(19) United States
(12) Patent Application Publication
(10) Pub. No.: US 2023/0285586 A1
(43) Pub. Date: Sep. 14, 2023

(54) MUSCLE TARGETING COMPLEXES AND USES THEREOF FOR TREATING DYSTROPHINOPATHIES

(71) Applicant: Dyne Therapeutics, Inc., Waltham, MA (US)

(72) Inventors: Romesh R. Subramanian, Framingham, MA (US); Mohammed T. Qatanani, Waltham, MA (US); Timothy Weeden, Waltham, MA (US); Cody A. Desjardins, Waltham, MA (US); Brendan Quinn, Boston, MA (US); John Najim, Waltham, MA (US)

(73) Assignee: Dyne Therapeutics, Inc., Waltham, MA (US)

(21) Appl. No.: 18/017,179

(22) PCT Filed: Jul. 9, 2021
(86) PCT No.: PCT/US21/40998

§ 371 Date: Jan. 20, 2023

Related U.S. Application Data
(60) Provisional application No. 63/055,777, filed on Jul. 23, 2020.
(60) Provisional application No. 63/069,077, filed on Aug. 23, 2020.
(60) Provisional application No. 63/143,829, filed on Jan. 30, 2021.

(51) Int. Cl. A61K 47/68; A61P 21/00

(52) U.S. Cl. CPC A61K 47/6849; A61K 47/6889; A61P 21/00

(57) ABSTRACT

Aspects of the disclosure relate to complexes comprising a muscle-targeting agent covalently linked to a molecular payload. In some embodiments, the muscle-targeting agent specifically binds to an internalizing cell surface receptor on muscle cells. In some embodiments, the molecular payload promotes the expression or activity of a functional dystrophin protein. In some embodiments, the molecular payload is an oligonucleotide, such as an antisense oligonucleotide, e.g., an oligonucleotide that causes exon skipping in a mRNA expressed from a mutant DMD allele.

### RELATED APPLICATIONS

[0001] This application claims priority under 35 U.S.C. § 119(e) to U.S. Provisional Application Ser. No. 63/143,829, entitled “MUSCLE TARGETING COMPLEXES AND USES THEREOF FOR TREATING DYSTROPHINOPATHIES”, filed on Jan. 30, 2021, to U.S. Provisional Application Ser. No. 63/069,077, entitled “MUSCLE TARGETING COMPLEXES AND USES THEREOF FOR TREATING DYSTROPHINOPATHIES”, filed on Aug. 23, 2020, and to U.S. Provisional Application Ser. No. 63/055,777, entitled “MUSCLE TARGETING COMPLEXES AND USES THEREOF FOR TREATING DYSTROPHINOPATHIES”, filed on Jul. 23, 2020; the contents of each of which are incorporated herein by reference in their entirety.

### FIELD OF THE INVENTION

[0002] The present application relates to targeting complexes for delivering molecular payloads (e.g., oligonucleotides) to cells and uses thereof, particularly uses relating to treatment of disease.

### REFERENCE TO SEQUENCE LISTING SUBMITTED AS A TEXT FILE VIA EFS-WEB

[0003] The instant application contains a sequence listing which has been submitted in ASCII format via EFS-Web and is hereby incorporated by reference in its entirety. Said ASCII copy, created on Jul. 8, 2021, is named D082470040WO00-SEQ-DWY and is 575,156 bytes in size.

### BACKGROUND OF INVENTION

[0004] Dystrophinopathies are a group of distinct neuromuscular diseases that result from mutations in dystrophin gene. Dystrophinopathies include Duchenne muscular dystrophy, Becker muscular dystrophy, and X-linked dilated cardiomyopathy. Dystrophin (DMD) is a large gene, containing 79 exons and about 2.6 million total base pairs. Numerous mutations in DMD, including exonic frameshift, deletion, substitution, and duplicative mutations, are able to diminish the expression of functional dystrophin, leading to dystrophinopathies. One agent that targets exon 51 of human DMD, eteplirsen, has been preliminarily approved by the U.S. Food and Drug Administration (FDA) however its efficacy is still being evaluated.

### SUMMARY OF INVENTION

[0005] According to some aspects, the disclosure provides complexes that target muscle cells for purposes of delivering molecular payloads to those cells. In some embodiments, complexes provided herein are particularly useful for delivering molecular payloads that increase or restore expression or activity of functional DMD. In some embodiments, complexes comprise oligonucleotide based molecular payloads that promote normal expression of functional DMD through an in-frame exon skipping mechanism or suppression of stop codons. In other embodiments, complexes are configured for delivering a mini-dystrophin gene or synthetic mRNA that increases or restores functional dystrophin activity. Accordingly, in some embodiments, complexes provided herein comprise muscle-targeting agents (e.g., muscle targeting antibodies) that specifically bind to receptors on the surface of muscle cells for purposes of delivering molecular payloads to the muscle cells. In some embodiments, the complexes are taken up into the cells via a receptor mediated internalization, following which the molecular payload may be released to perform a function inside the cells. For example, complexes engineered to deliver oligonucleotides may release the oligonucleotides such that the oligonucleotides can promote expression of functional DMD (e.g., through an exon skipping mechanism) in the muscle cells. In some embodiments, the oligonucleotides are released by endosomal cleavage of covalent linkers connecting oligonucleotides and muscle-targeting agents of the complexes.

[0006] One aspect of the present disclosure relates to a complex comprising an anti-transferrin receptor (TfR) antibody covalently linked to a molecular payload configured for promoting the expression or activity of a DMD gene, wherein the antibody comprises:
[0007] (i) a heavy chain variable region (VH) comprising an amino acid sequence at least 95% identical to SEQ ID NO: 76; and/or a light chain variable region (VL) comprising an amino acid sequence at least 95% identical to SEQ ID NO: 75;
[0008] (ii) a heavy chain variable region (VH) comprising an amino acid sequence at least 95% identical to SEQ ID NO: 69; and/or a light chain variable region (VL) comprising an amino acid sequence at least 95% identical to SEQ ID NO: 70;
[0009] (iii) a heavy chain variable region (VH) comprising an amino acid sequence at least 95% identical to SEQ ID NO: 71; and/or a light chain variable region (VL) comprising an amino acid sequence at least 95% identical to SEQ ID NO: 70;
[0010] (iv) a heavy chain variable region (VH) comprising an amino acid sequence at least 95% identical to SEQ ID NO: 72; and/or a light chain variable region (VL) comprising an amino acid sequence at least 95% identical to SEQ ID NO: 70;
[0011] (v) a heavy chain variable region (VH) comprising an amino acid sequence at least 95% identical to SEQ ID NO: 73; and/or a light chain variable region (VL) comprising an amino acid sequence at least 95% identical to SEQ ID NO: 74;
[0012] (vi) a heavy chain variable region (VH) comprising an amino acid sequence at least 95% identical to SEQ ID NO: 73; and/or a light chain variable region (VL) comprising an amino acid sequence at least 95% identical to SEQ ID NO: 75;
[0013] (vii) a heavy chain variable region (VH) comprising an amino acid sequence at least 95% identical to SEQ ID NO: 76; and/or a light chain variable region (VL) comprising an amino acid sequence at least 95% identical to SEQ ID NO: 74;
[0014] (viii) a heavy chain variable region (VH) comprising an amino acid sequence at least 95% identical to SEQ ID NO: 77; and/or a light chain variable region (VL) comprising an amino acid sequence at least 95% identical to SEQ ID NO: 78;
[0015] (ix) a heavy chain variable region (VH) comprising an amino acid sequence at least 95% identical to SEQ ID NO: 79; and/or a light chain variable region (VL) comprising an amino acid sequence at least 95% identical to SEQ ID NO: 80; or
[0016] (x) a heavy chain variable region (VH) comprising an amino acid sequence at least 95% identical to SEQ ID NO: 77; and/or a light chain variable region (VL) comprising an amino acid sequence at least 95% identical to SEQ ID NO: 80.

[0017] In some embodiments, the antibody comprises:
[0018] (i) a VH comprising the amino acid sequence of SEQ ID NO: 76 and a VL comprising the amino acid sequence of SEQ ID NO: 75;
[0019] (ii) a VH comprising the amino acid sequence of SEQ ID NO: 69 and a VL comprising the amino acid sequence of SEQ ID NO: 70;
[0020] (iii) a VH comprising the amino acid sequence of SEQ ID NO: 7land a VL comprising the amino acid sequence of SEQ ID NO: 70;
[0021] (iv) a VH comprising the amino acid sequence of SEQ ID NO: 72 and a VL comprising the amino acid sequence of SEQ ID NO: 70;
[0022] (v) a VH comprising the amino acid sequence of SEQ ID NO: 73 and a VL comprising the amino acid sequence of SEQ ID NO: 74;
[0023] (vi) a VH comprising the amino acid sequence of SEQ ID NO: 73 and a VL comprising the amino acid sequence of SEQ ID NO: 75;
[0024] (vii) a VH comprising the amino acid sequence of SEQ ID NO: 76 and a VL comprising the amino acid sequence of SEQ ID NO: 74;
[0025] (viii) a VH comprising the amino acid sequence of SEQ ID NO: 77 and a VL comprising the amino acid sequence of SEQ ID NO: 78;
[0026] (ix) a VH comprising the amino acid sequence of SEQ ID NO: 79 and a VL comprising the amino acid sequence of SEQ ID NO: 80; or
[0027] (x) a VH comprising the amino acid sequence of SEQ ID NO: 77 and a VL comprising the amino acid sequence of SEQ ID NO: 80.

[0028] In some embodiments, the antibody is selected from the group consisting of a Fab fragment, a Fab′ fragment, a F(ab′)2 fragment, a scFv, a Fv, and a full-length IgG. In some embodiments, the antibody is a Fab fragment.

[0029] In some embodiments, the antibody comprises:
[0030] (i) a heavy chain comprising an amino acid sequence at least 85% identical to SEQ ID NO: 101; and/or a light chain comprising an amino acid sequence at least 85% identical to SEQ ID NO: 90;
[0031] (ii) a heavy chain comprising an amino acid sequence at least 85% identical to SEQ ID NO: 97; and/or a light chain comprising an amino acid sequence at least 85% identical to SEQ ID NO: 85;
[0032] (iii) a heavy chain comprising an amino acid sequence at least 85% identical to SEQ ID NO: 98; and/or a light chain comprising an amino acid sequence at least 85% identical to SEQ ID NO: 85;
[0033] (iv) a heavy chain comprising an amino acid sequence at least 85% identical to SEQ ID NO: 99; and/or a light chain comprising an amino acid sequence at least 85% identical to SEQ ID NO: 85;
[0034] (v) a heavy chain comprising an amino acid sequence at least 85% identical to SEQ ID NO: 100; and/or a light chain comprising an amino acid sequence at least 85% identical to SEQ ID NO: 89;
[0035] (vi) a heavy chain comprising an amino acid sequence at least 85% identical to SEQ ID NO: 100; and/or a light chain comprising an amino acid sequence at least 85% identical to SEQ ID NO: 90;
[0036] (vii) a heavy chain comprising an amino acid sequence at least 85% identical to SEQ ID NO: 101; and/or a light chain comprising an amino acid sequence at least 85% identical to SEQ ID NO: 89;
[0037] (viii) a heavy chain comprising an amino acid sequence at least 85% identical to SEQ ID NO: 102; and/or a light chain comprising an amino acid sequence at least 85% identical to SEQ ID NO: 93;
[0038] (ix) a heavy chain comprising an amino acid sequence at least 85% identical to SEQ ID NO: 103; and/or a light chain comprising an amino acid sequence at least 85% identical to SEQ ID NO: 95; or
[0039] (x) a heavy chain comprising an amino acid sequence at least 85% identical to SEQ ID NO: 102; and/or a light chain comprising an amino acid sequence at least 85% identical to SEQ ID NO: 95.

[0040] In some embodiments, the antibody comprises:
[0041] (i) a heavy chain comprising the amino acid sequence of SEQ ID NO: 101; and a light chain comprising the amino acid sequence of SEQ ID NO: 90;
[0042] (ii) a heavy chain comprising the amino acid sequence of SEQ ID NO: 97; and a light chain comprising the amino acid sequence of SEQ ID NO: 85;
[0043] (iii) a heavy chain comprising the amino acid sequence of SEQ ID NO: 98; and a light chain comprising the amino acid sequence of SEQ ID NO: 85;
[0044] (iv) a heavy chain comprising the amino acid sequence of SEQ ID NO: 99; and a light chain comprising the amino acid sequence of SEQ ID NO: 85;
[0045] (v) a heavy chain comprising the amino acid sequence of SEQ ID NO: 100; and a light chain comprising the amino acid sequence of SEQ ID NO: 89;
[0046] (vi) a heavy chain comprising the amino acid sequence of SEQ ID NO: 100; and a light chain comprising the amino acid sequence of SEQ ID NO: 90;
[0047] (vii) a heavy chain comprising the amino acid sequence of SEQ ID NO: 101; and a light chain comprising the amino acid sequence of SEQ ID NO: 89;
[0048] (viii) a heavy chain comprising the amino acid sequence of SEQ ID NO: 102; and a light chain comprising the amino acid sequence of SEQ ID NO: 93;
[0049] (ix) a heavy chain comprising the amino acid sequence of SEQ ID NO: 103; and a light chain comprising the amino acid sequence of SEQ ID NO: 95; or
[0050] (x) a heavy chain comprising the amino acid sequence of SEQ ID NO: 102; and a light chain comprising the amino acid sequence of SEQ ID NO: 95.

[0051] In some embodiments, the antibody does not specifically bind to the transferrin binding site of the transferrin receptor and/or the muscle-targeting antibody does not inhibit binding of transferrin to the transferrin receptor.

[0052] In some embodiments, the molecular payload is an oligonucleotide. In some embodiments, the oligonucleotide promotes exon skipping in a DMD RNA. In some embodiments, the oligonucleotide promotes skipping of an exon of DMD in the range of exon 8 to exon 55. In some embodiments, the oligonucleotide promotes skipping of exon 8, exon 23, exon 43, exon 44, exon 45, exon 46, exon 50, exon 51, exon 52, exon 53, and/or exon 55.

[0053] In some embodiments, the oligonucleotide comprises a region of complementarity to one or more full or partial exonic splicing enhancers (ESE) of a DMD transcript. In some embodiments, the oligonucleotide comprises a region of complementarity to a target sequence comprising one or more full or partial ESEs as set forth in SEQ ID NOs: 402-436 and 2043-2238.

[0054] In some embodiments, the oligonucleotide promotes skipping of exon 51.

[0055] In some embodiments, the oligonucleotide is 20-30 nucleotides in length and comprises a region of complementarity to a target sequence comprising at least 4 consecutive nucleotides of an ESE as set forth in any one of SEQ ID NOs: 402-436.

[0056] In some embodiments, the oligonucleotide comprises any one of SEQ ID NOs: 437-1241, or comprises a region of complementarity to any one of SEQ ID NOs: 1242-2046.

[0057] In some embodiments, the oligonucleotide comprises a region of complementarity to a target sequence of an oligonucleotide listed in Table 14. In some embodiments, the oligonucleotide comprises a sequence listed in Table 14, wherein any one or more of the uracil bases (U's) in the oligonucleotide may optionally be a thymine base (T).

[0058] In some embodiments, the oligonucleotide comprises at least one modified internucleoside linkage. In some embodiments, the at least one modified internucleoside linkage is a phosphorothioate linkage.

[0059] In some embodiments, the oligonucleotide comprises one or more modified nucleosides. In some embodiments, the one or more modified nucleosides are 2′-modified nucleosides.

[0060] In some embodiments, the oligonucleotide comprises one or more phosphorodiamidate morpholinos, optionally wherein the oligonucleotide is a phosphorodiamidate morpholino oligomer (PMO).

[0061] In some embodiments, the antibody is covalently linked to the molecular payload via a cleavable linker. In some embodiments, the cleavable linker comprises a valine-citrulline sequence.

[0062] In some embodiments, the antibody is covalently linked to the molecular payload via conjugation to a lysine residue or a cysteine residue of the antibody.

[0063] Another aspect of the present disclosure relates to a method of promoting the expression or activity of a DMD protein in a cell, the method comprising contacting the cell with a complex disclosed herein in an amount effective for promoting internalization of the molecular payload to the cell, optionally wherein the cell is a muscle cell.

[0064] Another aspect of the present disclosure relates to a method of treating a subject having a mutated DMD allele that is associated with a dystrophinopathy, the method comprising administering to the subject an effective amount of a complex disclosed herein.

### BRIEF DESCRIPTION OF THE DRAWINGS

[0065] FIG. 1 depicts a non-limiting schematic showing the effect of transfecting cells with an siRNA.

[0066] FIG. 2 depicts a non-limiting schematic showing the activity of a muscle targeting complex comprising an siRNA.

[0067] FIGS. 3A-3B depict non-limiting schematics showing the activity of a muscle targeting complex comprising an siRNA in mouse muscle tissues (gastrocnemius and heart) in vivo, relative to control non-targeting complex comprising the same siRNA. (N=4 C57BL/6 WT mice)

[0068] FIGS. 4A-4E depict non-limiting schematics showing the tissue selectivity of a muscle targeting complex comprising an siRNA.

[0069] FIG. 5 depicts a non-limiting schematic showing the ability of an anti-transferrin receptor muscle targeting complex comprising an exon-23 skipping phosphorodiamidate morpholino oligomer (PMO) to dose-dependently enhance exon skipping in muscle tissues of a mdx mouse model.

[0070] FIGS. 6A-6B depict non-limiting schematics showing the ability of an anti-transferrin receptor muscle targeting complex comprising an exon-23 skipping PMO to dose-dependently increase dystrophin in skeletal muscle (quadriceps) of a mdx mouse model.

[0071] FIGS. 7A-7E depict non-limiting schematics showing the ability of an anti-transferrin receptor muscle targeting complex comprising an exon-23 skipping PMO to improve functional performance (FIGS. 7A, 7B, 7C, and 7D) and reduce creatine kinase levels (FIG. 7E) in an mdx mouse model. (** p<0.01; *** p<0.001; ****; p<0.0001; NS not significant)

[0072] FIG. 8 shows the serum stability of the linker used for linking an anti-TfR antibody and a molecular payload (e.g., an oligonucleotide) in various species over time after intravenous administration.

[0073] FIGS. 9A-9F show binding of humanized anti-TfR Fabs to human TfR1 (hTfR1) or cynomolgus monkey TfR1 (cTfR1), as measured by ELISA. FIG. 9A shows binding of humanized 3M12 variants to hTfR1. FIG. 9B shows binding of humanized 3M12 variants to cTfR1. FIG. 9C shows binding of humanized 3A4 variants to hTfR1. FIG. 9D shows binding of humanized 3A4 variants to cTfR1. FIG. 9E shows binding of humanized 5H12 variants to hTfR1. FIG. 9F shows binding of humanized 5H12 variants to hTfR1.

[0074] FIG. 10 shows the quantified cellular uptake of anti-TfR Fab conjugates into rhabdomyosarcoma (RD) cells. The molecular payload in the tested conjugates are DMPK-targeting oligonucleotides and the uptake of the conjugates were facilitated by indicated anti-TfR Fabs. Conjugates having a negative control Fab (anti-mouse TfR) or a positive control Fab (anti-human TfR1) are also included this assay. Cells were incubated with indicated conjugate at a concentration of 100 nM for 4 hours. Cellular uptake was measured by mean Cypher5e fluorescence.

[0075] FIGS. 11A-11F show binding of oligonucleotide-conjugated or unconjugated humanized anti-TfR Fabs to human TfR1 (hTfR1) and cynomolgus monkey TfR1 (cTfR1), as measured by ELISA. FIG. 11A shows the binding of humanized 3M12 variants alone or in conjugates with a DMPK targeting oligo to hTfR1. FIG. 11B shows the binding of humanized 3M12 variants alone or in conjugates with a DMPK targeting oligo to cTfR1. FIG. 11C shows the binding of humanized 3A4 variants alone or in conjugates with a DMPK targeting oligo to hTfR1. FIG. 11D shows the binding of humanized 3A4 variants alone or in conjugates with a DMPK targeting oligo to cTfR1. FIG. 11E shows the binding of humanized 5H12 variants alone or in conjugates with a DMPK targeting oligo to hTfR1. FIG. 11F shows the binding of humanized 5H12 variants alone or in conjugates with a DMPK targeting oligo to cTfR1. The respective EC₅₀ values are also shown.

[0076] FIG. 12 shows DMPK expression in RD cells treated with various concentrations of conjugates containing the indicated humanized anti-TfR antibodies conjugated to a DMPK-targeting oligonucleotide ASO300. The duration of treatment was 3 days. ASO300 delivered using transfection agents were used as control.

[0077] FIG. 13 shows skipping of exon 51 in human DMD myotubes, facilitated by a DMD exon 51 skipping oligonucleotide (a PMO). Cells were treated with the naked PMO or with PMO conjugated to an anti-TfR1 Fab (Ab-PMO).

[0078] FIG. 14 shows dose-dependent increase of dystrophin expression in quadriceps muscles of mdx mice after treatment with anti-mouse TfR1 (R17 217) conjugated to an oligonucleotide (a PMO) targeted to exon 23, as measured by western blotting for dystrophin, with alpha-actin as a loading control. The standards were generated using pooled wild-type protein and pooled mdx protein. The percent indicates the amount of WT protein spiked into the sample.

[0079] FIG. 15 shows quantification of dystrophin protein levels within quadriceps muscles of mdx mice after treatment with various doses of anti-mouse TfR (R17 217) conjugated to an oligonucleotide (a PMO) targeting exon 23.

[0080] FIG. 16 shows immunofluorescent staining images of quadriceps muscles from wild-type (WT) mice treated with saline, or mdx mice treated with saline, naked oligonucleotide or oligonucleotide conjugated to anti-mouse TfR1 (R17 217).

[0081] FIG. 17 shows data illustrating that conjugates containing designated anti-TfR Fabs (3M12 VH3/VK2, 3M12 VH4/VK3, and 3A4 VH3 N54S/VK4) conjugated to a DMD exon-skipping oligonucleotide resulted in enhanced exon skipping compared to the naked DMD exon skipping oligo in DMD patient myotubes.

[0082] FIG. 18 shows ELISA measurements of binding of anti-TfR Fab 3M12 VH4/Vk3 to recombinant human (circles), cynomolgus monkey (squares), mouse (upward triangles), or rat (downward triangles) TfR1 protein, at a range of concentrations from 230 pM to 500 nM of the Fab. Measurement results show that the anti-TfR Fab is reactive with human and cynomolgus monkey TfR1. Binding was not observed to mouse or rat recombinant TfR1. Data is shown as relative fluorescent units normalized to baseline.

[0083] FIG. 19 shows results of an ELISA testing the affinity of anti-TfR Fab 3M12 VH4/Vk3 to recombinant human TfR1 or TfR2 over a range of concentrations from 230 pM to 500 nM of Fab. The data are presented as relative fluorescence units normalized to baseline. The results demonstrate that the Fab does not bind recombinant human TfR2.

[0084] FIG. 20 shows the serum stability of the linker used for linking anti-TfR Fab 3M12 VH4/Vk3 to a control antisense oligonucleotide over 72 hours incubation in PBS or in rat, mouse, cynomolgus monkey or human serum.

[0085] FIGS. 21A-21C show quantification of exon 23 skipping in quadriceps (FIG. 21A), heart (FIG. 21B), and diaphragm (FIG. 21C) of wild-type (WT) and mdx mice two- or four-weeks following administration of a single dose of saline, unconjugated oligonucleotide (ASO) that induces exon 23 skipping in DMD, or conjugates containing an anti-TfR RI7217 Fab conjugated to the ASO (Ab-ASO). Little or no exon 23 skipping was observed in tissues from WT mice or from mdx mice administered saline or unconjugated ASO, whereas significant levels of exon 23 skipping was observed in tissues of mdx mice treated with Ab-ASO. (* p<0.05, ** p<0.01, **** p<0.0001)

[0086] FIGS. 22A-22D show measurement of dystrophin protein in quadriceps of mdx mice following administration of a single dose of unconjugated oligonucleotide (ASO) that induces exon 23 skipping in DMD, or conjugates containing an anti-TfR1 RI7217 Fab conjugated to the ASO (Ab-ASO). FIG. 22A shows western blots of dystrophin and alpha-actinin protein in muscle tissue two weeks following injection of ASO or Ab-ASO. FIG. 22B shows quantification of the dystrophin in the western blot of FIG. 23A relative to dystrophin protein in wild-type muscle. FIG. 22C shows western blots of dystrophin and alpha-actinin protein in muscle tissue four weeks following injection of ASO or Ab-ASO. FIG. 22D shows quantification of the dystrophin in the western blot of FIG. 22C relative to dystrophin protein in wild-type muscle. The standard curves in FIGS. 22A and 22C were generated by pooling tissue from wild-type (WT) and mdx mouse samples, and the percent WT indicates the amount of WT protein spiked into each sample. (* p<0.05; ns, not significant)

[0087] FIGS. 23A-23D show measurement of dystrophin protein in heart muscle of mdx mice following administration of a single dose of unconjugated oligonucleotide (ASO) that induces exon 23 skipping in DMD, or conjugates containing an anti-TfR1 R17217 Fab conjugated to the ASO (Ab-ASO). FIG. 23A shows western blots of dystrophin and alpha-actinin protein in muscle tissue two weeks following injection of ASO or Ab-ASO. FIG. 23B shows quantification of the dystrophin in the western blot of FIG. 23A relative to dystrophin protein in wild-type muscle. FIG. 23C shows western blots of dystrophin and alpha-actinin protein in muscle tissue four weeks following injection of ASO or Ab-ASO. FIG. 23D shows quantification of the dystrophin in the Western blot of FIG. 23C relative to dystrophin protein in wild-type muscle. The standard curves in FIGS. 23A and 23C were generated by pooling tissue from wild-type (WT) and mdx mouse samples, and the percent WT indicates the amount of WT protein spiked into each sample. (* p<0.05, **** p<0.0001)

[0088] FIGS. 24A-24D show measurement of dystrophin protein in diaphragm muscle of mdx mice following administration of a single dose of unconjugated oligonucleotide (ASO) that induces exon 23 skipping in DMD, or conjugates containing an anti-TfR1 RI7217 Fab conjugated to the ASO (Ab-ASO). FIG. 24A shows western blots of dystrophin and alpha-actinin protein in muscle tissue two weeks following injection of ASO or Ab-ASO. FIG. 24B shows quantification of the dystrophin in the western blot of FIG. 24A relative to dystrophin protein in wild-type muscle. FIG. 24C shows western blots of dystrophin and alpha-actinin protein in muscle tissue four weeks following injection of ASO or Ab-ASO. FIG. 24D shows quantification of the dystrophin in the Western blot of FIG. 24C relative to dystrophin protein in wild-type muscle. The standard curves in FIGS. 24A and 24C were generated by pooling tissue from wild-type (WT) and mdx mouse samples, and the percent WT indicates the amount of WT protein spiked into each sample. (** p<0.01, *** p<0.001)

[0089] FIGS. 25A-25C show quantification of the amount of administered oligonucleotide (ASO) in quadriceps (FIG. 25A), diaphragm (FIG. 25B), and heart (FIG. 25C) of wild-type (WT) or mdx mice two- or four-weeks following administration of a single dose of saline, unconjugated exon 23 skipping oligonucleotide (ASO), or conjugates containing an anti-TfR1 RI7217 Fab conjugated to the ASO (Ab-ASO).

[0090] FIG. 26 shows % exon 53 skipping in DMD patient cells harboring a deletion of DMD exon 52, following gymnotic uptake of exon 53-skipping oligonucleotides over a range of concentrations.

[0091] FIG. 27 shows % exon 53 skipping in DMD patient cells harboring a deletion of DMD exon 52, following treatment with exon 53-skipping PMO either not linked to an antibody (“Naked ASO”) or covalently linked to an anti-TfR1 Fab (“Anti-TfR1 Fab-ASO complex”) at a variety of concentrations.

### DETAILED DESCRIPTION OF INVENTION

[0092] Aspects of the disclosure relate to a recognition that while certain molecular payloads (e.g., oligonucleotides, peptides, small molecules) can have beneficial effects in muscle cells, it has proven challenging to effectively target such cells. As described herein, the present disclosure provides complexes comprising muscle-targeting agents covalently linked to molecular payloads in order to overcome such challenges. In some embodiments, the complexes are particularly useful for delivering molecular payloads that modulate (e.g., promote) the expression or activity of target genes in muscle cells, e.g., in a subject having or suspected of having a rare muscle disease. For example, in some embodiments, complexes are provided for targeting DMD, e.g., a mutated DMD allele. In some embodiments, complexes provided herein may comprise oligonucleotides that promote normal expression and activity of DMD. As another example, complexes may comprise oligonucleotides that induce skipping of exon of DMD mRNA. In some embodiments, synthetic nucleic acid payloads (e.g., DNA or RNA payloads) may be used that express one or more proteins that promote normal expression and activity of DMD.

[0093] In some embodiments, complexes may comprise molecular payloads of synthetic cDNAs and/or (e.g., and) synthetic mRNAs, e.g., that express dystrophin or fragments thereof (e.g., a dystrophin mini gene). In some embodiments, complexes may comprise molecular payloads such as guide molecules (e.g., guide RNAs) that are capable of targeting nucleic acid programmable nucleases (e.g., Cas9) to a sequence at or near a disease-associated mutation of DMD, e.g., a mutated DMD exon. In some embodiments, such nucleic programmable nucleases could be used to cleave part or all of a disease-associated mutation of DMD, e.g., a mutated DMD exon, to promote expression of functional DMD. In some embodiments, complexes may comprise molecular payloads that upregulate the expression and/or (e.g., and) activity of genes that can replace the function of dystrophin, such as utrophin.

[0094] Further aspects of the disclosure, including a description of defined terms, are provided below.

[0095] I. Definitions

[0096] Administering: As used herein, the terms “administering” or “administration” means to provide a complex to a subject in a manner that is physiologically and/or (e.g., and) pharmacologically useful (e.g., to treat a condition in the subject).

[0097] Approximately: As used herein, the term “approximately” or “about,” as applied to one or more values of interest, refers to a value that is similar to a stated reference value. In certain embodiments, the term “approximately” or “about” refers to a range of values that fall within 15%, 14%, 13%, 12%, 11%, 10%, 9%, 8%, 7%, 6%, 5%, 4%, 3%, 2%, 1%, or less in either direction (greater than or less than) of the stated reference value unless otherwise stated or otherwise evident from the context (except where such number would exceed 100% of a possible value).

[0098] Antibody: As used herein, the term “antibody” refers to a polypeptide that includes at least one immunoglobulin variable domain or at least one antigenic determinant, e.g., paratope that specifically binds to an antigen. In some embodiments, an antibody is a full-length antibody. In some embodiments, an antibody is a chimeric antibody. In some embodiments, an antibody is a humanized antibody. However, in some embodiments, an antibody is a Fab fragment, a Fab′ fragment, a F(ab′)2 fragment, a Fv fragment or a scFv fragment. In some embodiments, an antibody is a nanobody derived from a camelid antibody or a nanobody derived from shark antibody. In some embodiments, an antibody is a diabody. In some embodiments, an antibody comprises a framework having a human germline sequence. In another embodiment, an antibody comprises a heavy chain constant domain selected from the group consisting of IgG, IgG1, IgG2, IgG2A, IgG2B, IgG2C, IgG3, IgG4, IgA1, IgA2, IgD, IgM, and IgE constant domains. In some embodiments, an antibody comprises a heavy (H) chain variable region (abbreviated herein as VH), and/or (e.g., and) a light (L) chain variable region (abbreviated herein as VL). In some embodiments, an antibody comprises a constant domain, e.g., an Fc region. An immunoglobulin constant domain refers to a heavy or light chain constant domain. Human IgG heavy chain and light chain constant domain amino acid sequences and their functional variations are known. With respect to the heavy chain, in some embodiments, the heavy chain of an antibody described herein can be an alpha (α), delta (Δ), epsilon (ε), gamma (γ) or mu (μ) heavy chain. In some embodiments, the heavy chain of an antibody described herein can comprise a human alpha (a), delta (A), epsilon (ε), gamma (γ) or mu (μ) heavy chain. In a particular embodiment, an antibody described herein comprises a human gamma 1 CH1, CH2, and/or (e.g., and) CH3 domain. In some embodiments, the amino acid sequence of the VH domain comprises the amino acid sequence of a human gamma (γ) heavy chain constant region, such as any known in the art. Non-limiting examples of human constant region sequences have been described in the art, e.g., see U.S. Pat. No. 5,693,780 and Kabat E A et al., (1991) supra. In some embodiments, the VH domain comprises an amino acid sequence that is at least 70%, 75%, 80%, 85%, 90%, 95%, 98%, or at least 99% identical to any of the variable chain constant regions provided herein. In some embodiments, an antibody is modified, e.g., modified via glycosylation, phosphorylation, sumoylation, and/or (e.g., and) methylation. In some embodiments, an antibody is a glycosylated antibody, which is conjugated to one or more sugar or carbohydrate molecules. In some embodiments, the one or more sugar or carbohydrate molecule are conjugated to the antibody via N-glycosylation, O-glycosylation, C-glycosylation, glypiation (GPI anchor attachment), and/or (e.g., and) phosphoglycosylation. In some embodiments, the one or more sugar or carbohydrate molecule are monosaccharides, disaccharides, oligosaccharides, or glycans. In some embodiments, the one or more sugar or carbohydrate molecule is a branched oligosaccharide or a branched glycan. In some embodiments, the one or more sugar or carbohydrate molecule includes a mannose unit, a glucose unit, an N-acetylglucosamine unit, an N-acetylgalactosamine unit, a galactose unit, a fucose unit, or a phospholipid unit. In some embodiments, an antibody is a construct that comprises a polypeptide comprising one or more antigen binding fragments of the disclosure linked to a linker polypeptide or an immunoglobulin constant domain. Linker polypeptides comprise two or more amino acid residues joined by peptide bonds and are used to link one or more antigen binding portions. Examples of linker polypeptides have been reported (see e.g., Holliger, P., et al. (1993) Proc. Natl. Acad. Sci. USA 90:6444-6448; Poljak, R. J., et al. (1994) Structure 2:1121-1123). Still further, an antibody may be part of a larger immunoadhesion molecule, formed by covalent or noncovalent association of the antibody or antibody portion with one or more other proteins or peptides. Examples of such immunoadhesion molecules include use of the streptavidin core region to make a tetrameric scFv molecule (Kipriyanov, S. M., et al. (1995) Human Antibodies and Hybridomas 6:93-101) and use of a cysteine residue, a marker peptide and a C-terminal polyhistidine tag to make bivalent and biotinylated scFv molecules (Kipriyanov, S. M., et al. (1994) Mol. Immunol. 31:1047-1058).

[0099] CDR: As used herein, the term “CDR” refers to the complementarity determining region within antibody variable sequences. A typical antibody molecule comprises a heavy chain variable region (VH) and a light chain variable region (VL), which are usually involved in antigen binding. The VH and VL regions can be further subdivided into regions of hypervariability, also known as “complementarity determining regions” (“CDR”), interspersed with regions that are more conserved, which are known as “framework regions” (“FR”). Each VH and VL is typically composed of three CDRs and four FRs, arranged from amino-terminus to carboxy-terminus in the following order: FR1, CDR1, FR2, CDR2, FR3, CDR3, FR4. The extent of the framework region and CDRs can be precisely identified using methodology known in the art, for example, by the Kabat definition, the IMGT definition, the Chothia definition, the AbM definition, and/or (e.g., and) the contact definition, all of which are well known in the art. See, e.g., Kabat, E. A., et al. (1991) Sequences of Proteins of Immunological Interest, Fifth Edition, U.S. Department of Health and Human Services, NIH Publication No. 91-3242; IMGT®, the international ImMunoGeneTics information system® http://www.imgt.org, Lefranc, M.-P. et al., Nucleic Acids Res., 27:209-212 (1999); Ruiz, M. et al., Nucleic Acids Res., 28:219-221 (2000); Lefranc, M.-P., Nucleic Acids Res., 29:207-209 (2001); Lefranc, M.-P., Nucleic Acids Res., 31:307-310 (2003); Lefranc, M.-P. et al., In Silico Biol., 5, 0006 (2004) [Epub], 5:45-60 (2005); Lefranc, M.-P. et al., Nucleic Acids Res., 33:D593-597 (2005); Lefranc, M.-P. et al., Nucleic Acids Res., 37:D1006-1012 (2009); Lefranc, M.-P. et al., Nucleic Acids Res., 43:D413-422 (2015); Chothia et al., (1989) Nature 342:877; Chothia, C. et al. (1987) J. Mol. Biol. 196:901-917, Al-lazikani et al (1997) J. Molec. Biol. 273:927-948; and Almagro, J. Mol. Recognit. 17:132-143 (2004). See also hgmp.mrc.ac.uk and bioinf.org.uk/abs. As used herein, a CDR may refer to the CDR defined by any method known in the art. Two antibodies having the same CDR means that the two antibodies have the same amino acid sequence of that CDR as determined by the same method, for example, the IMGT definition.

[0100] There are three CDRs in each of the variable regions of the heavy chain and the light chain, which are designated CDR1, CDR2 and CDR3, for each of the variable regions. The term “CDR set” as used herein refers to a group of three CDRs that occur in a single variable region capable of binding the antigen. The exact boundaries of these CDRs have been defined differently according to different systems. The system described by Kabat (Kabat et al., Sequences of Proteins of Immunological Interest (National Institutes of Health, Bethesda, Md. (1987) and (1991)) not only provides an unambiguous residue numbering system applicable to any variable region of an antibody, but also provides precise residue boundaries defining the three CDRs. These CDRs may be referred to as Kabat CDRs. Sub-portions of CDRs may be designated as L1, L2 and L3 or H1, H2 and H3 where the “L” and the “H” designates the light chain and the heavy chains regions, respectively. These regions may be referred to as Chothia CDRs, which have boundaries that overlap with Kabat CDRs. Other boundaries defining CDRs overlapping with the Kabat CDRs have been described by Padlan (FASEB J. 9:133-139 (1995)) and MacCallum (J Mol Biol 262(5):732-45 (1996)). Still other CDR boundary definitions may not strictly follow one of the above systems, but will nonetheless overlap with the Kabat CDRs, although they may be shortened or lengthened in light of prediction or experimental findings that particular residues or groups of residues or even entire CDRs do not significantly impact antigen binding. The methods used herein may utilize CDRs defined according to any of these systems. Examples of CDR definition systems are provided in Table 1.

TABLE 1
CDR Definitions

| | IMGT¹ | Kabat² | Chothia³ |
|---|---|---|---|
| CDR-H1 | 27-38 | 31-35 | 26-32 |
| CDR-H2 | 56-65 | 50-65 | 53-55 |
| CDR-H3 | 105-116/117 | 95-102 | 96-101 |
| CDR-L1 | 27-38 | 24-34 | 26-32 |
| CDR-L2 | 56-65 | 50-56 | 50-52 |
| CDR-L3 | 105-116/117 | 89-97 | 91-96 |

¹IMGT ®, the international ImMunoGeneTics information system ®, imgt.org, Lefranc, M.-P. et al., Nucleic Acids Res., 27: 209-212 (1999)
²Kabat et al. (1991) Sequences of Proteins of Immunological Interest, Fifth Edition, U.S. Department of Health and Human Services, NIH Publication No. 91-3242
³Chothia et al., J. Mol. Biol. 196: 901-917 (1987))

[0101] CDR-grafted antibody: The term “CDR-grafted antibody” refers to antibodies which comprise heavy and light chain variable region sequences from one species but in which the sequences of one or more of the CDR regions of VH and/or (e.g., and) VL are replaced with CDR sequences of another species, such as antibodies having murine heavy and light chain variable regions in which one or more of the murine CDRs (e.g., CDR3) has been replaced with human CDR sequences.

[0102] Chimeric antibody: The term “chimeric antibody” refers to antibodies which comprise heavy and light chain variable region sequences from one species and constant region sequences from another species, such as antibodies having murine heavy and light chain variable regions linked to human constant regions.

[0103] Complementary: As used herein, the term “complementary” refers to the capacity for precise pairing between two nucleotides or two sets of nucleotides. In particular, complementary is a term that characterizes an extent of hydrogen bond pairing that brings about binding between two nucleotides or two sets of nucleotides. For example, if a base at one position of an oligonucleotide is capable of hydrogen bonding with a base at the corresponding position of a target nucleic acid (e.g., an mRNA), then the bases are considered to be complementary to each other at that position. Base pairings may include both canonical Watson-Crick base pairing and non-Watson-Crick base pairing (e.g., Wobble base pairing and Hoogsteen base pairing). For example, in some embodiments, for complementary base pairings, adenosine-type bases (A) are complementary to thymidine-type bases (T) or uracil-type bases (U), that cytosine-type bases (C) are complementary to guanosine-type bases (G), and that universal bases such as 3-nitropyrrole or 5-nitroindole can hybridize to and are considered complementary to any A, C, U, or T. Inosine (I) has also been considered in the art to be a universal base and is considered complementary to any A, C, U or T.

[0104] Conservative amino acid substitution: As used herein, a “conservative amino acid substitution” refers to an amino acid substitution that does not alter the relative charge or size characteristics of the protein in which the amino acid substitution is made. Variants can be prepared according to methods for altering polypeptide sequence known to one of ordinary skill in the art such as are found in references which compile such methods, e.g. Molecular Cloning: A Laboratory Manual, J. Sambrook, et al., eds., Fourth Edition, Cold Spring Harbor Laboratory Press, Cold Spring Harbor, N.Y., 2012, or Current Protocols in Molecular Biology, F. M. Ausubel, et al., eds., John Wiley & Sons, Inc., New York. Conservative substitutions of amino acids include substitutions made amongst amino acids within the following groups: (a) M, I, L, V; (b) F, Y, W; (c) K, R, H; (d) A, G; (e) S, T; (f) Q, N; and (g) E, D.

[0105] Covalently linked: As used herein, the term “covalently linked” refers to a characteristic of two or more molecules being linked together via at least one covalent bond. In some embodiments, two molecules can be covalently linked together by a single bond, e.g., a disulfide bond or disulfide bridge, that serves as a linker between the molecules. However, in some embodiments, two or more molecules can be covalently linked together via a molecule that serves as a linker that joins the two or more molecules together through multiple covalent bonds. In some embodiments, a linker may be a cleavable linker. However, in some embodiments, a linker may be a non-cleavable linker.

[0106] Cross-reactive: As used herein and in the context of a targeting agent (e.g., antibody), the term “cross-reactive,” refers to a property of the agent being capable of specifically binding to more than one antigen of a similar type or class (e.g., antigens of multiple homologs, paralogs, or orthologs) with similar affinity or avidity. For example, in some embodiments, an antibody that is cross-reactive against human and non-human primate antigens of a similar type or class (e.g., a human transferrin receptor and non-human primate transferrin receptor) is capable of binding to the human antigen and non-human primate antigens with a similar affinity or avidity. In some embodiments, an antibody is cross-reactive against a human antigen and a rodent antigen of a similar type or class. In some embodiments, an antibody is cross-reactive against a rodent antigen and a non-human primate antigen of a similar type or class. In some embodiments, an antibody is cross-reactive against a human antigen, a non-human primate antigen, and a rodent antigen of a similar type or class.

[0107] DMD: As used herein, the term “DMD” refers to a gene that encodes dystrophin protein, a key component of the dystrophin-glycoprotein complex, which bridges the inner cytoskeleton and the extracellular matrix in muscle cells, particularly muscle fibers. Deletions, duplications, and point mutations in DMD may cause dystrophinopathies, such as Duchenne muscular dystrophy, Becker muscular dystrophy, or cardiomyopathy (e.g., DMD-associated dilated cardiomyopathy). Alternative promoter usage and alternative splicing result in numerous distinct transcript variants and protein isoforms for this gene. In some embodiments, a dystrophin gene may be a human (Gene ID: 1756), non-human primate (e.g., Gene ID: 465559), or rodent gene (e.g., Gene ID: 13405; Gene ID: 24907). In addition, multiple human transcript variants (e.g., as annotated under GenBank RefSeq Accession Numbers: NM_000109.3, NM_004006.2 (SEQ ID NO: 2239), NM_004009.3, NM_004010.3 and NM_004011.3) have been characterized that encode different protein isoforms.

[0108] DMD allele: As used herein, the term “DMD allele” refers to any one of alternative forms (e.g., wild-type or mutant forms) of a DMD gene. In some embodiments, a DMD allele may encode for dystrophin that retains its normal and typical functions. In some embodiments, a DMD allele may comprise one or more mutations that results in muscular dystrophy. Common mutations that lead to Duchenne muscular dystrophy involve frameshift, deletion, substitution, and duplicative mutations of one or more of 79 exons present in a dystrophin allele, e.g., exon 8, exon 23, exon 41, exon 44, exon 50, exon 51, exon 52, exon 53, or exon 55. Further examples of DMD mutations are disclosed, for example, in Flanigan KM, et al., Mutational spectrum of DMD mutations in dystrophinopathy patients: application of modern diagnostic techniques to a large cohort. Hum Mutat. 2009 Dec.; 30 (12):1657-66, the contents of which are incorporated herein by reference in its entirety.

[0109] Dystrophinopathy: As used herein, the term “dystrophinopathy” refers to a muscle disease that results from one or more mutated DMD alleles. Dystrophinopathies include a spectrum of conditions (ranging from mild to severe) that includes Duchenne muscular dystrophy, Becker muscular dystrophy, and DMD-associated dilated cardiomyopathy (DCM). In some embodiments, at one end of the spectrum, dystrophinopathy is phenotypically associated with an asymptomatic increase in serum concentration of creatine phosphokinase (CK) and/or (e.g., and) muscle cramps with myoglobinuria. In some embodiments, at the other end of the spectrum, dystrophinopathy is phenotypically associated with progressive muscle diseases that are generally classified as Duchenne or Becker muscular dystrophy when skeletal muscle is primarily affected and as DMD-associated dilated cardiomyopathy (DCM) when the heart is primarily affected. Symptoms of Duchenne muscular dystrophy include muscle loss or degeneration, diminished muscle function, pseudohypertrophy of the tongue and calf muscles, higher risk of neurological abnormalities, and a shortened lifespan. Duchenne muscular dystrophy is associated with Online Mendelian Inheritance in Man (OMIM) Entry #310200. Becker muscular dystrophy is associated with OMIM Entry #300376. Dilated cardiomyopathy is associated with OMIM Entry X #302045.

[0110] Exonic splicing enhancer (ESE): As used herein, the term “exonic splicing enhancer” or “ESE” refers to a nucleic acid sequence motif within an exon of a gene, pre-mRNA, or mRNA that directs or enhances splicing of pre-mRNA into mRNA, e.g., as described in Blencowe et al., Trends Biochem Sci 25, 106-10. (2000), incorporated herein by reference. ESEs may direct or enhance splicing, for example, to remove one or more introns and/or one or more exons from a gene transcript. ESE motifs are typically 6-8 nucleobases in length. SR proteins (e.g., proteins encoded by the gene SRSF1, SRSF2, SRSF3, SRSF4, SRSF5, SRSF6, SRSF7, SRSF8, SRSF9, SRSF10, SRSF11, SRSF12, TRA2A or TRA2B) bind to ESEs through their RNA recognition motif region to facilitate splicing. ESE motifs can be identified through a number of methods, including those described in Cartegni et al., Nucleic Acids Research, 2003, Vol. 31, No. 13, 3568-3571, incorporated herein by reference.

[0111] Framework: As used herein, the term “framework” or “framework sequence” refers to the remaining sequences of a variable region minus the CDRs. Because the exact definition of a CDR sequence can be determined by different systems, the meaning of a framework sequence is subject to correspondingly different interpretations. The six CDRs (CDR-L1, CDR-L2, and CDR-L3 of light chain and CDR-H1, CDR-H2, and CDR-H3 of heavy chain) also divide the framework regions on the light chain and the heavy chain into four sub-regions (FR1, FR2, FR3 and FR4) on each chain, in which CDR1 is positioned between FR1 and FR2, CDR2 between FR2 and FR3, and CDR3 between FR3 and FR4. Without specifying the particular sub-regions as FR1, FR2, FR3 or FR4, a framework region, as referred by others, represents the combined FRs within the variable region of a single, naturally occurring immunoglobulin chain. As used herein, a FR represents one of the four sub-regions, and FRs represents two or more of the four sub-regions constituting a framework region. Human heavy chain and light chain acceptor sequences are known in the art. In one embodiment, the acceptor sequences known in the art may be used in the antibodies disclosed herein.

[0112] Human antibody: The term “human antibody”, as used herein, is intended to include antibodies having variable and constant regions derived from human germline immunoglobulin sequences. The human antibodies of the disclosure may include amino acid residues not encoded by human germline immunoglobulin sequences (e.g., mutations introduced by random or site-specific mutagenesis in vitro or by somatic mutation in vivo), for example in the CDRs and in particular CDR3. However, the term “human antibody”, as used herein, is not intended to include antibodies in which CDR sequences derived from the germline of another mammalian species, such as a mouse, have been grafted onto human framework sequences.

[0113] Humanized antibody: The term “humanized antibody” refers to antibodies which comprise heavy and light chain variable region sequences from a non-human species (e.g., a mouse) but in which at least a portion of the VH and/or (e.g., and) VL sequence has been altered to be more “human-like”, i.e., more similar to human germline variable sequences. One type of humanized antibody is a CDR-grafted antibody, in which human CDR sequences are introduced into non-human VH and VL sequences to replace the corresponding nonhuman CDR sequences. In one embodiment, humanized anti-transferrin receptor antibodies and antigen binding portions are provided. Such antibodies may be generated by obtaining murine anti-transferrin receptor monoclonal antibodies using traditional hybridoma technology followed by humanization using in vitro genetic engineering, such as those disclosed in Kasaian et al PCT publication No. WO 2005/123126 A2.

[0114] Internalizing cell surface receptor: As used herein, the term, “internalizing cell surface receptor” refers to a cell surface receptor that is internalized by cells, e.g., upon external stimulation, e.g., ligand binding to the receptor. In some embodiments, an internalizing cell surface receptor is internalized by endocytosis. In some embodiments, an internalizing cell surface receptor is internalized by clathrin-mediated endocytosis. However, in some embodiments, an internalizing cell surface receptor is internalized by a clathrin-independent pathway, such as, for example, phagocytosis, macropinocytosis, caveolae- and raft-mediated uptake or constitutive clathrin-independent endocytosis. In some embodiments, the internalizing cell surface receptor comprises an intracellular domain, a transmembrane domain, and/or (e.g., and) an extracellular domain, which may optionally further comprise a ligand-binding domain. In some embodiments, a cell surface receptor becomes internalized by a cell after ligand binding. In some embodiments, a ligand may be a muscle-targeting agent or a muscle-targeting antibody. In some embodiments, an internalizing cell surface receptor is a transferrin receptor.

[0115] Isolated antibody: An “isolated antibody”, as used herein, is intended to refer to an antibody that is substantially free of other antibodies having different antigenic specificities (e.g., an isolated antibody that specifically binds transferrin receptor is substantially free of antibodies that specifically bind antigens other than transferrin receptor). An isolated antibody that specifically binds transferrin receptor complex may, however, have cross-reactivity to other antigens, such as transferrin receptor molecules from other species. Moreover, an isolated antibody may be substantially free of other cellular material and/or (e.g., and) chemicals.

[0116] Kabat numbering: The terms “Kabat numbering”, “Kabat definitions and “Kabat labeling” are used interchangeably herein. These terms, which are recognized in the art, refer to a system of numbering amino acid residues which are more variable (i.e. hypervariable) than other amino acid residues in the heavy and light chain variable regions of an antibody, or an antigen binding portion thereof (Kabat et al. (1971) Ann. NY Acad, Sci. 190:382-391 and, Kabat, E. A., et al. (1991) Sequences of Proteins of Immunological Interest, Fifth Edition, U.S. Department of Health and Human Services, NIH Publication No. 91-3242). For the heavy chain variable region, the hypervariable region ranges from amino acid positions 31 to 35 for CDR1, amino acid positions 50 to 65 for CDR2, and amino acid positions 95 to 102 for CDR3. For the light chain variable region, the hypervariable region ranges from amino acid positions 24 to 34 for CDR1, amino acid positions 50 to 56 for CDR2, and amino acid positions 89 to 97 for CDR3.

[0117] Molecular payload: As used herein, the term “molecular payload” refers to a molecule or species that functions to modulate a biological outcome. In some embodiments, a molecular payload is linked to, or otherwise associated with a muscle-targeting agent. In some embodiments, the molecular payload is a small molecule, a protein, a peptide, a nucleic acid, or an oligonucleotide. In some embodiments, the molecular payload functions to modulate the transcription of a DNA sequence, to modulate the expression of a protein, or to modulate the activity of a protein. In some embodiments, the molecular payload is an oligonucleotide that comprises a strand having a region of complementarity to a target gene.

[0118] Muscle-targeting agent: As used herein, the term, “muscle-targeting agent,” refers to a molecule that specifically binds to an antigen expressed on muscle cells. The antigen in or on muscle cells may be a membrane protein, for example an integral membrane protein or a peripheral membrane protein. Typically, a muscle-targeting agent specifically binds to an antigen on muscle cells that facilitates internalization of the muscle-targeting agent (and any associated molecular payload) into the muscle cells. In some embodiments, a muscle-targeting agent specifically binds to an internalizing, cell surface receptor on muscles and is capable of being internalized into muscle cells through receptor mediated internalization. In some embodiments, the muscle-targeting agent is a small molecule, a protein, a peptide, a nucleic acid (e.g., an aptamer), or an antibody. In some embodiments, the muscle-targeting agent is linked to a molecular payload.

[0119] Muscle-targeting antibody: As used herein, the term, “muscle-targeting antibody,” refers to a muscle-targeting agent that is an antibody that specifically binds to an antigen found in or on muscle cells. In some embodiments, a muscle-targeting antibody specifically binds to an antigen on muscle cells that facilitates internalization of the muscle-targeting antibody (and any associated molecular payment) into the muscle cells. In some embodiments, the muscle-targeting antibody specifically binds to an internalizing, cell surface receptor present on muscle cells. In some embodiments, the muscle-targeting antibody is an antibody that specifically binds to a transferrin receptor.

[0120] Oligonucleotide: As used herein, the term “oligonucleotide” refers to an oligomeric nucleic acid compound of up to 200 nucleotides in length. Examples of oligonucleotides include, but are not limited to, RNAi oligonucleotides (e.g., siRNAs, shRNAs), microRNAs, gapmers, mixmers, phosphorodiamidate morpholinos, peptide nucleic acids, aptamers, guide nucleic acids (e.g., Cas9 guide RNAs), etc. Oligonucleotides may be single-stranded or double-stranded. In some embodiments, an oligonucleotide may comprise one or more modified nucleotides (e.g. 2′-O-methyl sugar modifications, purine or pyrimidine modifications). In some embodiments, an oligonucleotide may comprise one or more modified internucleotide linkage. In some embodiments, an oligonucleotide may comprise one or more phosphorothioate linkages, which may be in the Rp or Sp stereochemical conformation.

[0121] Recombinant antibody: The term “recombinant human antibody”, as used herein, is intended to include all human antibodies that are prepared, expressed, created or isolated by recombinant means, such as antibodies expressed using a recombinant expression vector transfected into a host cell (described in more details in this disclosure), antibodies isolated from a recombinant, combinatorial human antibody library (Hoogenboom H. R., (1997) TIB Tech. 15:62-70; Azzazy H., and Highsmith W. E., (2002) Clin. Biochem. 35:425-445; Gavilondo J. V., and Larrick J. W. (2002) BioTechniques 29:128-145; Hoogenboom H., and Chames P. (2000) Immunology Today 21:371-378), antibodies isolated from an animal (e.g., a mouse) that is transgenic for human immunoglobulin genes (see e.g., Taylor, L. D., et al. (1992) Nucl. Acids Res. 20:6287-6295; Kellermann S-A., and Green L. L. (2002) Current Opinion in Biotechnology 13:593-597; Little M. et al (2000) Immunology Today 21:364-370) or antibodies prepared, expressed, created or isolated by any other means that involves splicing of human immunoglobulin gene sequences to other DNA sequences. Such recombinant human antibodies have variable and constant regions derived from human germline immunoglobulin sequences. In certain embodiments, however, such recombinant human antibodies are subjected to in vitro mutagenesis (or, when an animal transgenic for human Ig sequences is used, in vivo somatic mutagenesis) and thus the amino acid sequences of the VH and VL regions of the recombinant antibodies are sequences that, while derived from and related to human germline VH and VL sequences, may not naturally exist within the human antibody germline repertoire in vivo. One embodiment of the disclosure provides fully human antibodies capable of binding human transferrin receptor which can be generated using techniques well known in the art, such as, but not limited to, using human Ig phage libraries such as those disclosed in Jermutus et al., PCT publication No. WO 2005/007699 A2.

[0122] Region of complementarity: As used herein, the term “region of complementarity” refers to a nucleotide sequence, e.g., of a oligonucleotide, that is sufficiently complementary to a cognate nucleotide sequence, e.g., of a target nucleic acid, such that the two nucleotide sequences are capable of annealing to one another under physiological conditions (e.g., in a cell). In some embodiments, a region of complementarity is fully complementary to a cognate nucleotide sequence of target nucleic acid. However, in some embodiments, a region of complementarity is partially complementary to a cognate nucleotide sequence of target nucleic acid (e.g., at least 80%, 90%, 95% or 99% complementarity). In some embodiments, a region of complementarity contains 1, 2, 3, or 4 mismatches compared with a cognate nucleotide sequence of a target nucleic acid.

[0123] Specifically binds: As used herein, the term “specifically binds” refers to the ability of a molecule to bind to a binding partner with a degree of affinity or avidity that enables the molecule to be used to distinguish the binding partner from an appropriate control in a binding assay or other binding context. With respect to an antibody, the term, “specifically binds”, refers to the ability of the antibody to bind to a specific antigen with a degree of affinity or avidity, compared with an appropriate reference antigen or antigens, that enables the antibody to be used to distinguish the specific antigen from others, e.g., to an extent that permits preferential targeting to certain cells, e.g., muscle cells, through binding to the antigen, as described herein. In some embodiments, an antibody specifically binds to a target if the antibody has a K_{D} for binding the target of at least about 10⁻⁴ M, 10 ⁻⁵ M, 10⁻⁶ M, 10⁻⁷ M, 10−8 M, 10−9 M, 10⁻¹⁰ M, 10⁻¹¹ M, 10⁻¹² M, 10⁻¹³ M, or less. In some embodiments, an antibody specifically binds to the transferrin receptor, e.g., an epitope of the apical domain of transferrin receptor.

[0124] Subject: As used herein, the term “subject” refers to a mammal. In some embodiments, a subject is non-human primate, or rodent. In some embodiments, a subject is a human. In some embodiments, a subject is a patient, e.g., a human patient that has or is suspected of having a disease. In some embodiments, the subject is a human patient who has or is suspected of having a disease resulting from a mutated DMD gene sequence, e.g., a mutation in an exon of a DMD gene sequence. In some embodiments, a subject has a dystrophinopathy, e.g., Duchenne muscular dystrophy.

[0125] Transferrin receptor: As used herein, the term, “transferrin receptor” (also known as TFRC, CD71, p90, TFR, or TFR1) refers to an internalizing cell surface receptor that binds transferrin to facilitate iron uptake by endocytosis. In some embodiments, a transferrin receptor may be of human (NCBI Gene ID 7037), non-human primate (e.g., NCBI Gene ID 711568 or NCBI Gene ID 102136007), or rodent (e.g., NCBI Gene ID 22042) origin. In addition, multiple human transcript variants have been characterized that encoded different isoforms of the receptor (e.g., as annotated under GenBank RefSeq Accession Numbers: NP_001121620.1, NP_003225.2, NP_001300894.1, and NP_001300895.1).

[0126] 2′-modified nucleoside: As used herein, the terms “2′-modified nucleoside” and “2′-modified ribonucleoside” are used interchangeably and refer to a nucleoside having a sugar moiety modified at the 2′ position. In some embodiments, the 2′-modified nucleoside is a 2′-4′ bicyclic nucleoside, where the 2′ and 4′ positions of the sugar are bridged (e.g., via a methylene, an ethylene, or a (S)-constrained ethyl bridge). In some embodiments, the 2′-modified nucleoside is a non-bicyclic 2′-modified nucleoside, e.g., where the 2′ position of the sugar moiety is substituted. Non-limiting examples of 2′-modified nucleosides include: 2′-deoxy, 2′-fluoro (2′-F), 2′-O-methyl (2′-O-Me), 2′-O-methoxyethyl (2′-MOE), 2′-O-aminopropyl (2′-O-AP), 2′-O-dimethylaminoethyl (2′-O-DMAOE), 2′-O-dimethylaminopropyl (2′-O-DMAP), 2′-O-dimethylaminoethyloxyethyl (2′-O-DMAEOE), 2′-O—N-methylacetamido (2′-O-NMA), locked nucleic acid (LNA, methylene-bridged nucleic acid), ethylene-bridged nucleic acid (ENA), and (S)-constrained ethyl-bridged nucleic acid (cEt). In some embodiments, the 2′-modified nucleosides described herein are high-affinity modified nucleotides and oligonucleotides comprising the 2′-modified nucleotides have increased affinity to a target sequences, relative to an unmodified oligonucleotide. Examples of structures of 2′-modified nucleosides are provided below:

[chemical structure]

[0127] II. Complexes

[0128] Provided herein are complexes that comprise a targeting agent, e.g. an antibody, covalently linked to a molecular payload. In some embodiments, a complex comprises a muscle-targeting antibody covalently linked to an oligonucleotide. A complex may comprise an antibody that specifically binds a single antigenic site or that binds to at least two antigenic sites that may exist on the same or different antigens.

[0129] A complex may be used to modulate the activity or function of at least one gene, protein, and/or (e.g., and) nucleic acid. In some embodiments, the molecular payload present with a complex is responsible for the modulation of a gene, protein, and/or (e.g., and) nucleic acids. A molecular payload may be a small molecule, protein, nucleic acid, oligonucleotide, or any molecular entity capable of modulating the activity or function of a gene, protein, and/or (e.g., and) nucleic acid in a cell. In some embodiments, a molecular payload is an oligonucleotide that targets a disease-associated repeat in muscle cells.

[0130] In some embodiments, a complex comprises a muscle-targeting agent, e.g. an anti-transferrin receptor antibody, covalently linked to a molecular payload, e.g. a mixmer antisense oligonucleotide that targets a mutated DMD allele to promote exon skipping.

[0131] A. Muscle-Targeting Agents

[0132] Some aspects of the disclosure provide muscle-targeting agents, e.g., for delivering a molecular payload to a muscle cell. In some embodiments, such muscle-targeting agents are capable of binding to a muscle cell, e.g., via specifically binding to an antigen on the muscle cell, and delivering an associated molecular payload to the muscle cell. In some embodiments, the molecular payload is bound (e.g., covalently bound) to the muscle targeting agent and is internalized into the muscle cell upon binding of the muscle targeting agent to an antigen on the muscle cell, e.g., via endocytosis. It should be appreciated that various types of muscle-targeting agents may be used in accordance with the disclosure. For example, the muscle-targeting agent may comprise, or consist of, a nucleic acid (e.g., DNA or RNA), a peptide (e.g., an antibody), a lipid (e.g., a microvesicle), or a sugar moiety (e.g., a polysaccharide). Exemplary muscle-targeting agents are described in further detail herein, however, it should be appreciated that the exemplary muscle-targeting agents provided herein are not meant to be limiting.

[0133] Some aspects of the disclosure provide muscle-targeting agents that specifically bind to an antigen on muscle, such as skeletal muscle, smooth muscle, or cardiac muscle. In some embodiments, any of the muscle-targeting agents provided herein bind to (e.g., specifically bind to) an antigen on a skeletal muscle cell, a smooth muscle cell, and/or (e.g., and) a cardiac muscle cell.

[0134] By interacting with muscle-specific cell surface recognition elements (e.g., cell membrane proteins), both tissue localization and selective uptake into muscle cells can be achieved. In some embodiments, molecules that are substrates for muscle uptake transporters are useful for delivering a molecular payload into muscle tissue. Binding to muscle surface recognition elements followed by endocytosis can allow even large molecules such as antibodies to enter muscle cells. As another example molecular payloads conjugated to transferrin or anti-transferrin receptor antibodies can be taken up by muscle cells via binding to transferrin receptor, which may then be endocytosed, e.g., via clathrin-mediated endocytosis.

[0135] The use of muscle-targeting agents may be useful for concentrating a molecular payload (e.g., oligonucleotide) in muscle while reducing toxicity associated with effects in other tissues. In some embodiments, the muscle-targeting agent concentrates a bound molecular payload in muscle cells as compared to another cell type within a subject. In some embodiments, the muscle-targeting agent concentrates a bound molecular payload in muscle cells (e.g., skeletal, smooth, or cardiac muscle cells) in an amount that is at least 1, 2, 3, 4, 5, 6, 7, 8, 9, 10, 15, 20, 30, 40, 50, 60, 70, 80, 90, or 100 times greater than an amount in non-muscle cells (e.g., liver, neuronal, blood, or fat cells). In some embodiments, a toxicity of the molecular payload in a subject is reduced by at least 1%, 2%, 3%, 4%, 5%, 10%, 15%, 20%, 25%, 30%, 35%, 40%, 45%, 50%, 55%, 60%, 65%, 70%, 75%, 80%, 90%, or 95% when it is delivered to the subject when bound to the muscle-targeting agent.

[0136] In some embodiments, to achieve muscle selectivity, a muscle recognition element (e.g., a muscle cell antigen) may be required. As one example, a muscle-targeting agent may be a small molecule that is a substrate for a muscle-specific uptake transporter. As another example, a muscle-targeting agent may be an antibody that enters a muscle cell via transporter-mediated endocytosis. As another example, a muscle targeting agent may be a ligand that binds to cell surface receptor on a muscle cell. It should be appreciated that while transporter-based approaches provide a direct path for cellular entry, receptor-based targeting may involve stimulated endocytosis to reach the desired site of action.

[0137] i. Muscle-Targeting Antibodies

[0138] In some embodiments, the muscle-targeting agent is an antibody. Generally, the high specificity of antibodies for their target antigen provides the potential for selectively targeting muscle cells (e.g., skeletal, smooth, and/or (e.g., and) cardiac muscle cells). This specificity may also limit off-target toxicity. Examples of antibodies that are capable of targeting a surface antigen of muscle cells have been reported and are within the scope of the disclosure. For example, antibodies that target the surface of muscle cells are described in Arahata K., et al. “Immunostaining of skeletal and cardiac muscle surface membrane with antibody against Duchenne muscular dystrophy peptide” Nature 1988; 333: 861-3; Song K. S., et al. “Expression of caveolin-3 in skeletal, cardiac, and smooth muscle cells. Caveolin-3 is a component of the sarcolemma and co-fractionates with dystrophin and dystrophin-associated glycoproteins” J Biol Chem 1996; 271: 15160-5; and Weisbart R. H. et al., “Cell type specific targeted intracellular delivery into muscle of a monoclonal antibody that binds myosin IIb” Mol Immunol. 2003 Mar. 39(13):78309; the entire contents of each of which are incorporated herein by reference.

[0139] a. Anti-Transferrin Receptor Antibodies

[0140] Some aspects of the disclosure are based on the recognition that agents binding to transferrin receptor, e.g., anti-transferrin-receptor antibodies, are capable of targeting muscle cell. Transferrin receptors are internalizing cell surface receptors that transport transferrin across the cellular membrane and participate in the regulation and homeostasis of intracellular iron levels. Some aspects of the disclosure provide transferrin receptor binding proteins, which are capable of binding to transferrin receptor. Accordingly, aspects of the disclosure provide binding proteins (e.g., antibodies) that bind to transferrin receptor. In some embodiments, binding proteins that bind to transferrin receptor are internalized, along with any bound molecular payload, into a muscle cell. As used herein, an antibody that binds to a transferrin receptor may be referred to interchangeably as an, transferrin receptor antibody, an anti-transferrin receptor antibody, or an anti-TfR antibody. Antibodies that bind, e.g. specifically bind, to a transferrin receptor may be internalized into the cell, e.g. through receptor-mediated endocytosis, upon binding to a transferrin receptor.

[0141] It should be appreciated that anti-transferrin receptor antibodies may be produced, synthesized, and/or (e.g., and) derivatized using several known methodologies, e.g. library design using phage display. Exemplary methodologies have been characterized in the art and are incorporated by reference (Diez, P. et al. “High-throughput phage-display screening in array format”, Enzyme and microbial technology, 2015, 79, 34-41.; Christoph M. H. and Stanley, J. R. “Antibody Phage Display: Technique and Applications” J Invest Dermatol. 2014, 134:2.; Engleman, Edgar (Ed.) “Human Hybridomas and Monoclonal Antibodies.” 1985, Springer.). In other embodiments, an anti-transferrin antibody has been previously characterized or disclosed. Antibodies that specifically bind to transferrin receptor are known in the art (see, e.g. U.S. Pat. No. 4,364,934, filed Dec. 4, 1979, “Monoclonal antibody to a human early thymocyte antigen and methods for preparing same”; U.S. Pat. No. 8,409,573, filed Jun. 14, 2006, “Anti-CD71 monoclonal antibodies and uses thereof for treating malignant tumor cells”; U.S. Pat. No. 9,708,406, filed May 20, 2014, “Anti-transferrin receptor antibodies and methods of use”; U.S. Pat. No. 9,611,323, filed Dec. 19, 2014, “Low affinity blood brain barrier receptor antibodies and uses therefor”; WO 2015/098989, filed Dec. 24, 2014, “Novel anti-Transferrin receptor antibody that passes through blood-brain barrier”; Schneider C. et al. “Structural features of the cell surface receptor for transferrin that is recognized by the monoclonal antibody OKT9.” J Biol Chem. 1982, 257:14, 8516-8522.; Lee et al. “Targeting Rat Anti-Mouse Transferrin Receptor Monoclonal Antibodies through Blood-Brain Barrier in Mouse” 2000, J Pharmacol. Exp. Ther., 292: 1048-1052.).

[0142] Provided herein, in some aspects, are new anti-TfR antibodies for use as the muscle targeting agents (e.g., in muscle targeting complexes). In some embodiments, the anti-TfR antibody described herein binds to transferrin receptor with high specificity and affinity. In some embodiments, the anti-TfR antibody described herein specifically binds to any extracellular epitope of a transferrin receptor or an epitope that becomes exposed to an antibody. In some embodiments, anti-TfR antibodies provided herein bind specifically to transferrin receptor from human, non-human primates, mouse, rat, etc. In some embodiments, anti-TfR antibodies provided herein bind to human transferrin receptor. In some embodiments, the anti-TfR antibody described herein binds to an amino acid segment of a human or non-human primate transferrin receptor, as provided in SEQ ID NOs: 105-108. In some embodiments, the anti-TfR antibody described herein binds to an amino acid segment corresponding to amino acids 90-96 of a human transferrin receptor as set forth in SEQ ID NO: 105, which is not in the apical domain of the transferrin receptor.

[0143] An example human transferrin receptor amino acid sequence, corresponding to NCBI sequence NP_003225.2 (transferrin receptor protein 1 isoform 1, Homo sapiens) is as follows:

(SEQ ID NO: 105)
MMDQARSAFSNLFGGEPLSYTRFSLARQVDGDNSHVEMKLAVDEEENAD
NNTKANVTKPKRCSGSICYGTIAVIVFFLIGFMIGYLGYCKGVEPKTEC
ERLAGTESPVREEPGEDFPAARRLYWDDLKRKLSEKLDSTDFTGTIKLL
NENSYVPREAGSQKDENLALYVENQFREFKLSKVWRDQHFVKIQVKDSA
QNSVIIVDKNGRLVYLVENPGGYVAYSKAATVTGKLVHANFGTKKDFED
LYTPVNGSIVIVRAGKITFAEKVANAESLNAIGVLIYMDQTKFPIVNAE
LSFFGHAHLGTGDPYTPGFPSFNHTQFPPSRSSGLPNIPVQTISRAAAE
KLFGNMEGDCPSDWKTDSTCRMVTSESKNVKLTVSNVLKEIKILNIFGV
IKGFVEPDHYVVVGAQRDAWGPGAAKSGVGTALLLKLAQMFSDMVLKDG
FQPSRSIIFASWSAGDFGSVGATEWLEGYLSSLHLKAFTYINLDKAVLG
TSNFKVSASPLLYTLIEKTMQNVKHPVTGQFLYQDSNWASKVEKLTLDN
AAFPFLAYSGIPAVSFCFCEDTDYPYLGTTMDTYKELIERIPELNKVAR
AAAEVAGQFVIKLTHDVELNLDYERYNSQLLSFVRDLNQYRADIKEMGL
SLQWLYSARGDFFRATSRLTTDFGNAEKTDRFVMKKLNDRVMRVEYHFL
SPYVSPKESPFRHVFWGSGSHTLPALLENLKLRKQNNGAFNETLFRNQL
ALATWTIQGAANALSGDVWDIDNEF.

[0144] An example non-human primate transferrin receptor amino acid sequence, corresponding to NCBI sequence NP_001244232.1(transferrin receptor protein 1, Macaca mulatta) is as follows:

(SEQ ID NO: 106)
MMDQARSAFSNLFGGEPLSYTRFSLARQVDGDNSHVEMKLGVDEEENTD
NNTKPNGTKPKRCGGNICYGTIAVIIFFLIGFMIGYLGYCKGVEPKTEC
ERLAGTESPAREEPEEDFPAAPRLYWDDLKRKLSEKLDTTDFTSTIKLL
NENLYVPREAGSQKDENLALYIENQFREFKLSKVWRDQHFVKIQVKDSA
QNSVIIVDKNGGLVYLVENPGGYVAYSKAATVTGKLVHANFGTKKDFED
LDSPVNGSIVIVRAGKITFAEKVANAESLNAIGVLIYMDQTKFPIVKAD
LSFFGHAHLGTGDPYTPGFPSFNHTQFPPSQSSGLPNIPVQTISRAAAE
KLFGNMEGDCPSDWKTDSTCKMVTSENKSVKLTVSNVLKETKILNIFGV
IKGFVEPDHYVVVGAQRDAWGPGAAKSSVGTALLLKLAQMFSDMVLKDG
FQPSRSIIFASWSAGDFGSVGATEWLEGYLSSLHLKAFTYINLDKAVLG
TSNFKVSASPLLYTLIEKTMQDVKHPVTGRSLYQDSNWASKVEKLTLDN
AAFPFLAYSGIPAVSFCFCEDTDYPYLGTTMDTYKELVERIPELNKVAR
AAAEVAGQFVIKLTHDTELNLDYERYNSQLLLFLRDLNQYRADVKEMGL
SLQWLYSARGDFFRATSRLTTDFRNAEKRDKFVMKKLNDRVMRVEYYFL
SPYVSPKESPFRHVFWGSGSHTLSALLESLKLRRQNNSAFNETLFRNQL
ALATWTIQGAANALSGDVWDIDNEF

[0145] An example non-human primate transferrin receptor amino acid sequence, corresponding to NCBI sequence XP_005545315.1 (transferrin receptor protein 1, Macaca fascicularis) is as follows:

(SEQ ID NO: 107)
MMDQARSAFSNLFGGEPLSYTRFSLARQVDGDNSHVEMKLGVDEEENTD
NNTKANGTKPKRCGGNICYGTIAVIIFFLIGFMIGYLGYCKGVEPKTEC
ERLAGTESPAREEPEEDFPAAPRLYWDDLKRKLSEKLDTTDFTSTIKLL
NENLYVPREAGSQKDENLALYIENQFREFKLSKVWRDQHFVKIQVKDSA
QNSVIIVDKNGGLVYLVENPGGYVAYSKAATVTGKLVHANFGTKKDFED
LDSPVNGSIVIVRAGKITFAEKVANAESLNAIGVLIYMDQTKFPIVKAD
LSFFGHAHLGTGDPYTPGFPSFNHTQFPPSQSSGLPNIPVQTISRAAAE
KLFGNMEGDCPSDWKTDSTCKMVTSENKSVKLTVSNVLKETKILNIFGV
IKGFVEPDHYVVVGAQRDAWGPGAAKSSVGTALLLKLAQMFSDMVLKDG
FQPSRSIIFASWSAGDFGSVGATEWLEGYLSSLHLKAFTYINLDKAVLG
TSNFKVSASPLLYTLIEKTMQDVKHPVTGRSLYQDSNWASKVEKLTLDN
AAFPFLAYSGIPAVSFCFCEDTDYPYLGTTMDTYKELVERIPELNKVAR
AAAEVAGQFVIKLTHDTELNLDYERYNSQLLLFLRDLNQYRADVKEMGL
SLQWLYSARGDFFRATSRLTTDFRNAEKRDKFVMKKLNDRVMRVEYYFL
SPYVSPKESPFRHVFWGSGSHTLSALLESLKLRRQNNSAFNETLFRNQL
ALATWTIQGAANALSGDVWDIDNEF.

[0146] An example mouse transferrin receptor amino acid sequence, corresponding to NCBI sequence NP_001344227.1 (transferrin receptor protein 1, Mus musculus) is as follows:

(SEQ ID NO: 108)
MMDQARSAFSNLFGGEPLSYTRFSLARQVDGDNSHVEMKLAADEEENAD
NNMKASVRKPKRFNGRLCFAAIALVIFFLIGFMSGYLGYCKRVEQKEEC
VKLAETEETDKSETMETEDVPTSSRLYWADLKTLLSEKLNSIEFADTIK
QLSQNTYTPREAGSQKDESLAYYIENQFHEFKFSKVWRDEHYVKIQVKS
SIGQNMVTIVQSNGNLDPVESPEGYVAFSKPTEVSGKLVHANFGTKKDF
EELSYSVNGSLVIVRAGEITFAEKVANAQSFNAIGVLIYMDKNKFPVVE
ADLALFGHAHLGTGDPYTPGFPSFNHTQFPPSQSSGLPNIPVQTISRAA
AEKLFGKMEGSCPARWNIDSSCKLELSQNQNVKLIVKNVLKERRILNIF
GVIKGYEEPDRYVVVGAQRDALGAGVAAKSSVGTGLLLKLAQVFSDMIS
KDGFRPSRSIIFASWTAGDFGAVGATEWLEGYLSSLHLKAFTYINLDKV
VLGTSNFKVSASPLLYTLMGKIMQDVKHPVDGKSLYRDSNWISKVEKLS
FDNAAYPFLAYSGIPAVSFCFCEDADYPYLGTRLDTYEALTQKVPQLNQ
MVRTAAEVAGQLIIKLTHDVELNLDYEMYNSKLLSFMKDLNQFKTDIRD
MGLSLQWLYSARGDYFRATSRLTTDFHNAEKTNRFVMREINDRIMKVEY
HFLSPYVSPRESPFRHIFWGSGSHTLSALVENLKLRQKNITAFNETLFR
NQLALATWTIQGVANALSGDIWNIDNEF

[0147] In some embodiments, an anti-transferrin receptor antibody binds to an amino acid segment of the receptor as follows: FVKIQVKDSAQNSVIIVDKNGRLVYLVENPGGYVAYSKAATVTGKLVHANFGTKKDF EDLYTPVNGSIVIVRAGKITFAEKVANAESLNAIGVLIYMDQTKFPIVNAELSFFGHAH LGTGDPYTPGFPSFNHTQFPPSRSSGLPNIPVQTISRAAAEKLFGNMEGDCPSDWKTDS TCRMVTSESKNVKLTVSNVLKE (SEQ ID NO: 109) and does not inhibit the binding interactions between transferrin receptors and transferrin and/or (e.g., and) human hemochromatosis protein (also known as HFE). In some embodiments, the anti-transferrin receptor antibody described herein does not bind an epitope in SEQ ID NO: 109.

[0148] Appropriate methodologies may be used to obtain and/or (e.g., and) produce antibodies, antibody fragments, or antigen-binding agents, e.g., through the use of recombinant DNA protocols. In some embodiments, an antibody may also be produced through the generation of hybridomas (see, e.g., Kohler, G and Milstein, C. “Continuous cultures of fused cells secreting antibody of predefined specificity” Nature, 1975, 256: 495-497). The antigen-of-interest may be used as the immunogen in any form or entity, e.g., recombinant or a naturally occurring form or entity. Hybridomas are screened using standard methods, e.g. ELISA screening, to find at least one hybridoma that produces an antibody that targets a particular antigen. Antibodies may also be produced through screening of protein expression libraries that express antibodies, e.g., phage display libraries. Phage display library design may also be used, in some embodiments, (see, e.g. U.S. Pat. No. 5,223,409, filed Mar. 1, 1991, “Directed evolution of novel binding proteins”; WO 1992/18619, filed Apr. 10, 1992, “Heterodimeric receptor libraries using phagemids”; WO 1991/17271, filed May 1, 1991, “Recombinant library screening methods”; WO 1992/20791, filed May 15, 1992, “Methods for producing members of specific binding pairs”; WO 1992/15679, filed Feb. 28, 1992, and “Improved epitope displaying phage”). In some embodiments, an antigen-of-interest may be used to immunize a non-human animal, e.g., a rodent or a goat. In some embodiments, an antibody is then obtained from the non-human animal, and may be optionally modified using a number of methodologies, e.g., using recombinant DNA techniques. Additional examples of antibody production and methodologies are known in the art (see, e.g. Harlow et al. “Antibodies: A Laboratory Manual”, Cold Spring Harbor Laboratory, 1988.).

[0149] In some embodiments, an antibody is modified, e.g., modified via glycosylation, phosphorylation, sumoylation, and/or (e.g., and) methylation. In some embodiments, an antibody is a glycosylated antibody, which is conjugated to one or more sugar or carbohydrate molecules. In some embodiments, the one or more sugar or carbohydrate molecule are conjugated to the antibody via N-glycosylation, O-glycosylation, C-glycosylation, glypiation (GPI anchor attachment), and/or (e.g., and) phosphoglycosylation. In some embodiments, the one or more sugar or carbohydrate molecules are monosaccharides, disaccharides, oligosaccharides, or glycans. In some embodiments, the one or more sugar or carbohydrate molecule is a branched oligosaccharide or a branched glycan. In some embodiments, the one or more sugar or carbohydrate molecule includes a mannose unit, a glucose unit, an N-acetylglucosamine unit, an N-acetylgalactosamine unit, a galactose unit, a fucose unit, or a phospholipid unit. In some embodiments, there are about 1-10, about 1-5, about 5-10, about 1-4, about 1-3, or about 2 sugar molecules. In some embodiments, a glycosylated antibody is fully or partially glycosylated. In some embodiments, an antibody is glycosylated by chemical reactions or by enzymatic means. In some embodiments, an antibody is glycosylated in vitro or inside a cell, which may optionally be deficient in an enzyme in the N- or O- glycosylation pathway, e.g. a glycosyltransferase. In some embodiments, an antibody is functionalized with sugar or carbohydrate molecules as described in International Patent Application Publication WO2014065661, published on May 1, 2014, entitled, “Modified antibody, antibody-conjugate and process for the preparation thereof”.

[0150] In some embodiments, the anti-TfR antibody of the present disclosure comprises a VL domain and/or (e.g., and) VH domain of any one of the anti-TfR antibodies selected from Table 2, and comprises a constant region comprising the amino acid sequences of the constant regions of an IgG, IgE, IgM, IgD, IgA or IgY immunoglobulin molecule, any class (e.g., IgG1, IgG2, IgG3, IgG4, IgA1 and IgA2), or any subclass (e.g., IgG2a and IgG2b) of immunoglobulin molecule. Non-limiting examples of human constant regions are described in the art, e.g., see Kabat E A et al., (1991) supra.

[0151] In some embodiments, agents binding to transferrin receptor, e.g., anti-TfR antibodies, are capable of targeting muscle cell and/or (e.g., and) mediate the transportation of an agent across the blood brain barrier. Transferrin receptors are internalizing cell surface receptors that transport transferrin across the cellular membrane and participate in the regulation and homeostasis of intracellular iron levels. Some aspects of the disclosure provide transferrin receptor binding proteins, which are capable of binding to transferrin receptor. Antibodies that bind, e.g. specifically bind, to a transferrin receptor may be internalized into the cell, e.g. through receptor-mediated endocytosis, upon binding to a transferrin receptor.

[0152] Provided herein, in some aspects, are humanized antibodies that bind to transferrin receptor with high specificity and affinity. In some embodiments, the humanized anti-TfR antibody described herein specifically binds to any extracellular epitope of a transferrin receptor or an epitope that becomes exposed to an antibody. In some embodiments, the humanized anti-TfR antibodies provided herein bind specifically to transferrin receptor from human, non-human primates, mouse, rat, etc. In some embodiments, the humanized anti-TfR antibodies provided herein bind to human transferrin receptor. In some embodiments, the humanized anti-TfR antibody described herein binds to an amino acid segment of a human or non-human primate transferrin receptor, as provided in SEQ ID NOs: 105-108. In some embodiments, the humanized anti-TfR antibody described herein binds to an amino acid segment corresponding to amino acids 90-96 of a human transferrin receptor as set forth in SEQ ID NO: 105, which is not in the apical domain of the transferrin receptor. In some embodiments, the humanized anti-TfR antibodies described herein binds to TfR1 but does not bind to TfR2.

[0153] In some embodiments, an anti-TFR antibody specifically binds a TfR1 (e.g., a human or non-human primate TfR1) with binding affinity (e.g., as indicated by Kd) of at least about 10-4 M, 10⁻⁵ M, 10⁻⁶ M, 10⁻⁷ M, 10−8 M, 10−9 M, 10⁻¹⁰ M, 10⁻¹¹ M, 10⁻¹² M, 10⁻¹³ M, or less. In some embodiments, the anti-TfR antibodies described herein binds to TfR1 with a KD of sub-nanomolar range. In some embodiments, the anti-TfR antibodies described herein selectively binds to transferrin receptor 1 (TfR1) but do not bind to transferrin receptor 2 (TfR2). In some embodiments, the anti-TfR antibodies described herein binds to human TfR1 and cyno TfR1 (e.g., with a Kd of 10⁻⁷ M, 10−8 M, 10−9 M, 10⁻¹⁰ M, 10⁻¹¹ M, 10⁻¹² M, 10⁻¹³ M, or less), but does not bind to a mouse TfR1. The affinity and binding kinetics of the anti-TfR antibody can be tested using any suitable method including but not limited to biosensor technology (e.g., OCTET or BIACORE). In some embodiments, binding of any one of the anti-TfR antibody described herein does not complete with or inhibit transferrin binding to the TfR1. In some embodiments, binding of any one of the anti-TfR antibody described herein does not complete with or inhibit HFE-beta-2-microglobulin binding to the TfR1.

[0154] The anti-TfR antibodies described herein are humanized antibodies. The CDR and variable region amino acid sequences of the mouse monoclonal anti-TfR antibody from which the humanized anti-TfR antibodies described herein are derived are provided in Table 2.

TABLE 2
Mouse Monoclonal Anti-TfR Antibodies

| | No. | | | |
|---|---|---|---|---|
| Ab | system | IMGT | Kabat | Chothia |
| 3-A4 | CDR- | GFNIKDDY (SEQ ID | DDYMY (SEQ ID NO: 7) | GFNIKDD (SEQ ID |
| | H1 | NO: 1) | | NO: 12) |
| | CDR- | IDPENGDT (SEQ ID | WIDPENGDTEYASKFQD | ENG (SEQ ID NO: |
| | H2 | NO: 2) | (SEQ ID NO: 8) | 13) |
| | CDR- | TLWLRRGLDY (SEQ | WLRRGLDY (SEQ ID NO: 9) | LRRGLD (SEQ ID NO: |
| | H3 | ID NO: 3) | | 14) |
| | CDR- | KSLLHSNGYTY (SEQ | RSSKSLLHSNGYTYLF | SKSLLHSNGYTY (SEQ |
| | L1 | ID NO: 4) | (SEQ ID NO: 10) | ID NO: 15) |
| | CDR- | RMS (SEQ ID NO: 5) | RMSNLAS (SEQ ID NO: 11) | RMS (SEQ ID NO: 5) |
| | L2 | | | |
| | CDR- | MQHLEYPFT (SEQ ID | MQHLEYPFT (SEQ ID NO: 6) | HLEYPF (SEQ ID NO: |
| | L3 | NO: 6) | | 16) |
| | VH | EVQLQQSGAELVRPGASVKLSCTASGFNIKDDYMYWVKQRPEQGLEWIGWIDPENGDT | | |
| | | EYASKFQDKATVTADTSSNTAYLQLSSLTSEDTAVYYCTLWLRRGLDYWGQGTSVTVS | | |
| | | S (SEQ ID NO: 17) | | |
| | VL | DIVMTQAAPSVPVTPGESVSISCRSSKSLLHSNGYTYLFWFLQRPGQSPQLLIYRMSNLA | | |
| | | SGVPDRFSGSGSGTAFTLRISRVEAEDVGVYYCMQHLEYPFTFGGGTKLEIK (SEQ ID | | |
| | | NO: 18) | | |
| 3-A4 | CDR- | GFNIKDDY (SEQ ID | DDYMY (SEQ ID NO: 7) | GFNIKDD (SEQ ID |
| N54T* | H1 | NO: 1) | | NO: 12) |
| | CDR- | IDPETGDT (SEQ ID | WIDPETGDTEYASKFQD | ETG (SEQ ID NO: 21) |
| | H2 | NO: 19) | (SEQ ID NO: 20) | |
| | CDR- | TLWLRRGLDY (SEQ ID | WLRRGLDY (SEQ ID NO: 9) | LRRGLD (SEQ ID NO: |
| | H3 | NO: 3) | | 14) |
| | CDR- | KSLLHSNGYTY (SEQ ID | RSSKSLLHSNGYTYLF (SEQ | SKSLLHSNGYTY (SEQ ID |
| | L1 | NO: 4) | ID NO: 10) | NO: 15) |
| | CDR- | RMS (SEQ ID NO: 5) | RMSNLAS (SEQ ID NO: 11) | RMS(SEQ ID NO: 5) |
| | L2 | | | |
| | CDR- | MQHLEYPFT (SEQ ID | MQHLEYPFT (SEQ ID NO: 6) | HLEYPF (SEQ ID NO: |
| | L3 | NO: 6) | | 16) |
| | VH | EVQLQQSGAELVRPGASVKLSCTASGFNIKDDYMYWVKQRPEQGLEWIGWIDPETGDT | | |
| | | EYASKFQDKATVTADTSSNTAYLQLSSLTSEDTAVYYCTLWLRRGLDYWGQGTSVTVS | | |
| | | S (SEQ ID NO: 22) | | |
| | VL | DIVMTQAAPSVPVTPGESVSISCRSSKSLLHSNGYTYLFWFLQRPGQSPQLLIYRMSNLA | | |
| | | SGVPDRFSGSGSGTAFTLRISRVEAEDVGVYYCMQHLEYPFTFGGGTKLEIK (SEQ ID | | |
| | | NO: 18) | | |
| 3-A4 | CDR- | GFNIKDDY (SEQ ID NO: | DDYMY (SEQ ID NO: 7) | GFNIKDD (SEQ ID NO: |
| N54S* | H1 | 1) | | 12) |
| | CDR- | IDPESGDT (SEQ ID NO: | WIDPESGDTEYASKFQD | ESG (SEQ ID NO: 25) |
| | H2 | 23) | (SEQ ID NO: 24) | |
| | CDR- | TLWLRRGLDY (SEQ ID | WLRRGLDY (SEQ ID NO: 9) | LRRGLD (SEQ ID NO: |
| | H3 | NO: 3) | | 14) |
| | CDR- | KSLLHSNGYTY (SEQ ID | RSSKSLLHSNGYTYLF (SEQ | SKSLLHSNGYTY (SEQ ID |
| | L1 | NO: 4) | ID NO: 10) | NO: 15) |
| | CDR- | RMS (SEQ ID NO: 5) | RMSNLAS (SEQ ID NO: 11) | RMS (SEQ ID NO: 5) |
| | L2 | | | |
| | CDR- | MQHLEYPFT (SEQ ID | MQHLEYPFT (SEQ ID NO: 6) | HLEYPF (SEQ ID NO: |
| | L3 | NO: 6) | | 16) |
| | VH | EVQLQQSGAELVRPGASVKLSCTASGFNIKDDYMYWVKQRPEQGLEWIGWIDPESGDT | | |
| | | EYASKFQDKATVTADTSSNTAYLQLSSLTSEDTAVYYCTLWLRRGLDYWGQGTSVTVS | | |
| | | S (SEQ ID NO: 26) | | |
| | VL | DIVMTQAAPSVPVTPGESVSISCRSSKSLLHSNGYTYLFWFLQRPGQSPQLLIYRMSNLA | | |
| | | SGVPDRFSGSGSGTAFTLRISRVEAEDVGVYYCMQHLEYPFTFGGGTKLEIK (SEQ ID | | |
| | | NO: 18) | | |
| 3-M12 | CDR- | GYSITSGYY (SEQ ID | SGYYWN (SEQ ID NO: 33) | GYSITSGY (SEQ ID NO: |
| | H1 | NO: 27) | | 38 |
| | CDR- | ITFDGAN (SEQ ID NO: | YITFDGANNYNPSLKN (SEQ | FDG (SEQ ID NO: 39) |
| | H2 | 28) | ID NO: 34) | |
| | CDR- | TRSSYDYDVLDY (SEQ | SSYDYDVLDY (SEQ ID NO: | SYDYDVLD (SEQ ID NO: |
| | H3 | ID NO: 29) | 35 | 40) |
| | CDR- | QDISNF (SEQ ID NO: 30) | RASQDISNFLN (SEQ ID NO: | SQDISNF (SEQ ID NO: |
| | L1 | | 36) | 41) |
| | CDR- | YTS (SEQ ID NO: 31) | YTSRLHS (SEQ ID NO: 37) | YTS (SEQ ID NO: 31) |
| | L2 | | | |
| | CDR- | QQGHTLPYT (SEQ ID | QQGHTLPYT (SEQ ID NO: | GHTLPY (SEQ ID NO: |
| | L3 | NO: 32) | 32) | 42) |
| | VH | DVQLQESGPGLVKPSQSLSLTCSVTGYSITSGYYWNWIRQFPGNKLEWMGYITFDGAN | | |
| | | NYNPSLKNRISITRDTSKNQFFLKLTSVTTEDTATYYCTRSSYDYDVLDYWGQGTTLTV | | |
| | | SS (SEQ ID NO: 43) | | |
| | VL | DIQMTQTTSSLSASLGDRVTISCRASQDISNFLNWYQQRPDGTVKLLIYYTSRLHSGVPS | | |
| | | RFSGSGSGTDFSLTVSNLEQEDIATYFCQQGHTLPYTFGGGTKLEIK (SEQ ID NO: 44) | | |
| 5-H12 | CDR- | GYSFTDYC (SEQ ID NO: | DYCIN (SEQ ID NO: 51) | GYSFTDY (SEQ ID NO: |
| | H1 | 45) | | 56) |
| | CDR- | IYPGSGNT (SEQ ID NO: | WIYPGSGNTRYSERFKG | GSG (SEQ ID NO: 57) |
| | H2 | 46) | (SEQ ID NO: 52) | |
| | CDR- | AREDYYPYHGMDY | EDYYPYHGMDY (SEQ ID | DYYPYHGMD (SEQ ID |
| | H3 | (SEQ ID NO: 47) | NO: 53) | NO: 58) |
| | CDR- | ESVDGYDNSF (SEQ ID | RASESVDGYDNSFMH (SEQ | SESVDGYDNSF (SEQ ID |
| | L1 | NO: 48) | ID NO: 54) | NO: 59) |
| | CDR- | RAS (SEQ ID NO: 49) | RASNLES (SEQ ID NO: 55) | RAS (SEQ ID NO: 49) |
| | L2 | | | |
| | CDR- | QQSSEDPWT (SEQ ID | QQSSEDPWT (SEQ ID NO: | SSEDPW (SEQ ID NO: |
| | L3 | NO: 50) | 50) | 60) |
| | VH | QIQLQQSGPELVRPGASVKISCKASGYSFTDYYINWVNQRPGQGLEWIGWIYPGSGNTR | | |
| | | YSERFKGKATLTVDTSSNTAYMQLSSLTSEDSAVYFCAREDYYPYHGMDYWGQGTSV | | |
| | | TVSS (SEQ ID NO: 61) | | |
| | VL | DIVLTQSPTSLAVSLGQRATISCRASESVDGYDNSFMHWYQQKPGQPPKLLIFRASNLES | | |
| | | GIPARFSGSGSRTDFTLTINPVEAADVATYYCQQSSEDPWTFGGGTKLEIK (SEQ ID NO: 62) | | |
| 5-H12 | CDR- | GYSFTDYY (SEQ ID | DYYIN (SEQ ID NO: 64) | GYSFTDY (SEQ ID NO: |
| C33Y* | H1 | NO: 63) | | 56) |
| | CDR- | IYPGSGNT (SEQ ID NO: | WIYPGSGNTRYSERFKG | GSG (SEQ ID NO: 57) |
| | H2 | 46) | (SEQ ID NO: 52) | |
| | CDR- | AREDYYPYHGMDY | EDYYPYHGMDY (SEQ ID | DYYPYHGMD (SEQ ID |
| | H3 | (SEQ ID NO: 47) | NO: 53) | NO: 58) |
| | CDR- | ESVDGYDNSF (SEQ ID | RASESVDGYDNSFMH (SEQ | SESVDGYDNSF (SEQ ID |
| | L1 | NO: 48) | ID NO: 54) | NO: 59) |
| | CDR- | RAS (SEQ ID NO: 49) | RASNLES (SEQ ID NO: 55) | RAS (SEQ ID NO: 49) |
| | L2 | | | |
| | CDR- | QQSSEDPWT (SEQ ID | QQSSEDPWT (SEQ ID NO: 50) | SSEDPW (SEQ ID NO: |
| | L3 | NO: 50) | | 60) |
| | VH | QIQLQQSGPELVRPGASVKISCKASGYSFTDYYINWVNQRPGQGLEWIGWIYPGSGNTR | | |
| | | YSERFKGKATLTVDTSSNTAYMQLSSLTSEDSAVYFCAREDYYPYHGMDYWGQGTSV | | |
| | | TVSS (SEQ ID NO: 65) | | |
| | VL | DIVLTQSPTSLAVSLGQRATISCRASESVDGYDNSFMHWYQQKPGQPPKLLIFRASNLES | | |
| | | GIPARFSGSGSRTDFTLTINPVEAADVATYYCQQSSEDPWTFGGGTKLEIK (SEQ ID NO: 62) | | |
| 5-H12 | CDR- | GYSFTDYD (SEQ ID | DYDIN (SEQ ID NO: 67) | GYSFTDY (SEQ ID NO: |
| C33D* | H1 | NO: 66) | | 56) |
| | CDR- | IYPGSGNT (SEQ ID NO: | WIYPGSGNTRYSERFKG | GSG (SEQ ID NO: 57) |
| | H2 | 46) | (SEQ ID NO: 52) | |
| | CDR- | AREDYYPYHGMDY | EDYYPYHGMDY (SEQ ID | DYYPYHGMD (SEQ ID |
| | H3 | (SEQ ID NO: 47) | NO: 53) | NO: 58) |
| | CDR- | ESVDGYDNSF (SEQ ID | RASESVDGYDNSFMH (SEQ | SESVDGYDNSF (SEQ ID |
| | L1 | NO: 48) | ID NO: 54) | NO: 59) |
| | CDR- | RAS (SEQ ID NO: 49) | RASNLES (SEQ ID NO: 55) | RAS (SEQ ID NO: 49) |
| | L2 | | | |
| | CDR- | QQSSEDPWT (SEQ ID | QQSSEDPWT (SEQ ID NO: | SSEDPW (SEQ ID NO: |
| | L3 | NO: 50) | 50) | 60) |

| | |
|---|---|
| VH | QIQLQQSGPELVRPGASVKISCKASGYSFTDYDINWVNQRPGQGLEWIGWIYPGSGNTRY |
| | SERFKGKATLTVDTSSNTAYMQLSSLTSEDSAVYFCAREDYYPYHGMDYWGQGTSVTV |
| | SS (SEQ ID NO: 68) |
| VL | DIVLTQSPTSLAVSLGQRATISCRASESVDGYDNSFMHWYQQKPGQPPKLLIFRASNLES |
| | GIPARFSGSGSRTDFTLTINPVEAADVATYYCQQSSEDPWTFGGGTKLEIK (SEQ ID NO: |
| | 62) |

*mutation positions are according to Kabat numbering of the respective VH sequences containing the mutations

[0155] In some embodiments, the anti-TfR antibody of the present disclosure is a humanized variant of any one of the anti-TfR antibodies provided in Table 2. In some embodiments, the anti-TfR antibody of the present disclosure comprises a CDR-H1, a CDR-H2, a CDR-H3, a CDR-L1, a CDR-L2, and a CDR-L3 that are the same as the CDR-H1, CDR-H2, and CDR-H3 in any one of the anti-TfR antibodies provided in Table 2, and comprises a humanized heavy chain variable region and/or (e.g., and) a humanized light chain variable region.

[0156] Humanized antibodies are human immunoglobulins (recipient antibody) in which residues from a complementarity determining region (CDR) of the recipient are replaced by residues from a CDR of a non-human species (donor antibody) such as mouse, rat, or rabbit having the desired specificity, affinity, and capacity. In some embodiments, Fv framework region (FR) residues of the human immunoglobulin are replaced by corresponding non-human residues. Furthermore, the humanized antibody may comprise residues that are found neither in the recipient antibody nor in the imported CDR or framework sequences, but are included to further refine and optimize antibody performance. In general, the humanized antibody will comprise substantially all of at least one, and typically two, variable domains, in which all or substantially all of the CDR regions correspond to those of a non-human immunoglobulin and all or substantially all of the FR regions are those of a human immunoglobulin consensus sequence. The humanized antibody optimally also will comprise at least a portion of an immunoglobulin constant region or domain (Fc), typically that of a human immunoglobulin. Antibodies may have Fc regions modified as described in WO 99/58572. Other forms of humanized antibodies have one or more CDRs (one, two, three, four, five, six) which are altered with respect to the original antibody, which are also termed one or more CDRs derived from one or more CDRs from the original antibody. Humanized antibodies may also involve affinity maturation.

[0157] Humanized antibodies and methods of making them are known, e.g., as described in Almagro et al., Front. Biosci. 13:1619-1633 (2008); Riechmann et al., Nature 332:323-329 (1988); Queen et al., Proc. Nat'l Acad. Sci. USA 86:10029-10033 (1989); U.S. Pat. Nos. 5,821,337, 7,527,791, 6,982,321, and 7,087,409; Kashmiri et al., Methods 36:25-34 (2005); Padlan et al., Mol. Immunol. 28:489-498 (1991); Dall'Acqua et al., Methods 36:43-60 (2005); Osbourn et al., Methods 36:61-68 (2005); and Klimka et al., Br. J. Cancer, 83:252-260 (2000), the contents of all of which are incorporated herein by reference. Human framework regions that may be used for humanization are described in e.g., Sims et al. J. Immunol. 151:2296 (1993); Carter et al., Proc. Natl. Acad. Sci. USA, 89:4285 (1992); Presta et al., J. Immunol., 151:2623 (1993); Almagro et al., Front. Biosci. 13:1619-1633 (2008)); Baca et al., J. Biol. Chem. 272:10678-10684 (1997); and Rosok et al., J Biol. Chem. 271:22611-22618 (1996), the contents of all of which are incorporated herein by reference.

[0158] In some embodiments, the humanized anti-TfR antibody of the present disclosure comprises a humanized VH comprising one or more amino acid variations (e.g., in the VH framework region) as compared with any one of the VHs listed in Table 2, and/or (e.g., and) a humanized VL comprising one or more amino acid variations (e.g., in the VL framework region) as compared with any one of the VLs listed in Table 2.

[0159] In some embodiments, the humanized anti-TfR antibody of the present disclosure comprises a humanized VH containing no more than 25 amino acid variations (e.g., no more than 25, 24, 23, 22, 21, 20, 19, 18, 17, 16, 15, 14, 13, 12, 11, 10, 9, 8, 7, 6, 5, 4, 3, 2, or 1 amino acid variation) in the framework regions as compared with the VH of any of the anti-TfR antibodies listed in Table 2 (e.g., any one of SEQ ID NOs: 17, 22, 26, 43, 61, 65, and 68). Alternatively or in addition (e.g., in addition), the humanized anti-TfR antibody of the present disclosure comprises a humanized VL containing no more than 25 amino acid variations (e.g., no more than 25, 24, 23, 22, 21, 20, 19, 18, 17, 16, 15, 14, 13, 12, 11, 10, 9, 8, 7, 6, 5, 4, 3, 2, or 1 amino acid variation) in the framework regions as compared with the VL of any one of the anti-TfR antibodies listed in Table 2 (e.g., any one of SEQ ID NOs: 18, 44, and 62).

[0160] In some embodiments, the humanized anti-TfR antibody of the present disclosure comprises a humanized VH comprising an amino acid sequence that is at least 75% (e.g., 75%, 80%, 85%, 90%, 95%, 98%, or 99%) identical in the framework regions to the VH of any of the anti-TfR antibodies listed in Table 2 (e.g., any one of SEQ ID NOs: 17, 22, 26, 43, 61, 65, and 68). Alternatively or in addition (e.g., in addition), In some embodiments, the humanized anti-TfR antibody of the present disclosure comprises a humanized VL comprising an amino acid sequence that is at least 75% (e.g., 75%, 80%, 85%, 90%, 95%, 98%, or 99%) identical in the framework regions to the VL of any of the anti-TfR antibodies listed in Table 2 (e.g., any one of SEQ ID NOs: 18, 44, and 62).

[0161] In some embodiments, the humanized anti-TfR antibody of the present disclosure comprises a humanized VH comprising a CDR-H1 having the amino acid sequence of SEQ ID NO: 1 (according to the IMGT definition system), a CDR-H2 having the amino acid sequence of SEQ ID NO: 2, SEQ ID NO: 19, or SEQ ID NO: 23 (according to the IMGT definition system), a CDR-H3 having the amino acid sequence of SEQ ID NO: 3 (according to the IMGT definition system), and containing no more than 25 amino acid variations (e.g., no more than 25, 24, 23, 22, 21, 20, 19, 18, 17, 16, 15, 14, 13, 12, 11, 10, 9, 8, 7, 6, 5, 4, 3, 2, or 1 amino acid variation) in the framework regions as compared with the VH as set forth in SEQ ID NO: 17, SEQ ID NO: 22, or SEQ ID NO: 26. Alternatively or in addition (e.g., in addition), the anti-TfR antibody of the present disclosure comprises a humanized VL comprising a CDR-L1 having the amino acid sequence of SEQ ID NO: 4 (according to the IMGT definition system), a CDR-L2 having the amino acid sequence of SEQ ID NO: 5 (according to the IMGT definition system), and a CDR-L3 having the amino acid sequence of SEQ ID NO: 6 (according to the IMGT definition system), and containing no more than 25 amino acid variations (e.g., no more than 25, 24, 23, 22, 21, 20, 19, 18, 17, 16, 15, 14, 13, 12, 11, 10, 9, 8, 7, 6, 5, 4, 3, 2, or 1 amino acid variation) in the framework regions as compared with the VL as set forth in SEQ ID NO: 18.

[0162] In some embodiments, the humanized anti-TfR antibody of the present disclosure comprises a humanized VH comprising a CDR-H1 having the amino acid sequence of SEQ ID NO: 1 (according to the IMGT definition system), a CDR-H2 having the amino acid sequence of SEQ ID NO: 2, SEQ ID NO: 19, or SEQ ID NO: 23 (according to the IMGT definition system), a CDR-H3 having the amino acid sequence of SEQ ID NO: 3 (according to the IMGT definition system), and is at least 75% (e.g., 75%, 80%, 85%, 90%, 95%, 98%, or 99%) identical in the framework regions to the VH as set forth in SEQ ID NO: 17, SEQ ID NO: 22, or SEQ ID NO: 26. Alternatively or in addition (e.g., in addition), the humanized anti-TfR antibody of the present disclosure comprises a humanized VL comprising a CDR-L1 having the amino acid sequence of SEQ ID NO: 4 (according to the IMGT definition system), a CDR-L2 having the amino acid sequence of SEQ ID NO: 5 (according to the IMGT definition system), and a CDR-L3 having the amino acid sequence of SEQ ID NO: 6 (according to the IMGT definition system), and is at least 75% (e.g., 75%, 80%, 85%, 90%, 95%, 98%, or 99%) identical in the framework regions to the VL as set forth in any one of SEQ ID NO: 18.

[0163] In some embodiments, the humanized anti-TfR antibody of the present disclosure comprises a humanized VH comprising a CDR-H1 having the amino acid sequence of SEQ ID NO: 7 (according to the Kabat definition system), a CDR-H2 having the amino acid sequence of SEQ ID NO: 8, SEQ ID NO: 20, or SEQ ID NO: 24 (according to the Kabat definition system), a CDR-H3 having the amino acid sequence of SEQ ID NO: 9 (according to the Kabat definition system), and containing no more than 25 amino acid variations (e.g., no more than 25, 24, 23, 22, 21, 20, 19, 18, 17, 16, 15, 14, 13, 12, 11, 10, 9, 8, 7, 6, 5, 4, 3, 2, or 1 amino acid variation) in the framework regions as compared with the VH as set forth in SEQ ID NO: 17, SEQ ID NO: 22, or SEQ ID NO: 26. Alternatively or in addition (e.g., in addition), the humanized anti-TfR antibody of the present disclosure comprises a humanized VL comprising a CDR-L1 having the amino acid sequence of SEQ ID NO: 10 (according to the Kabat definition system), a CDR-L2 having the amino acid sequence of SEQ ID NO: 11 (according to the Kabat definition system), and a CDR-L3 having the amino acid sequence of SEQ ID NO: 6 (according to the Kabat definition system), and containing no more than 25 amino acid variations (e.g., no more than 25, 24, 23, 22, 21, 20, 19, 18, 17, 16, 15, 14, 13, 12, 11, 10, 9, 8, 7, 6, 5, 4, 3, 2, or 1 amino acid variation) in the framework regions as compared with the VL as set forth in SEQ ID NO: 18.

[0164] In some embodiments, the humanized anti-TfR antibody of the present disclosure comprises a humanized VH comprising a CDR-H1 having the amino acid sequence of SEQ ID NO: 7 (according to the Kabat definition system), a CDR-H2 having the amino acid sequence of SEQ ID NO: 8, SEQ ID NO: 20, or SEQ ID NO: 24 (according to the Kabat definition system), a CDR-H3 having the amino acid sequence of SEQ ID NO: 9 (according to the Kabat definition system), and is at least 75% (e.g., 75%, 80%, 85%, 90%, 95%, 98%, or 99%) identical in the framework regions to the VH as set forth in SEQ ID NO: 17, SEQ ID NO: 22, or SEQ ID NO: 26. Alternatively or in addition (e.g., in addition), the humanized anti-TfR antibody of the present disclosure comprises a humanized VL comprising a CDR-L1 having the amino acid sequence of SEQ ID NO: 10 (according to the Kabat definition system), a CDR-L2 having the amino acid sequence of SEQ ID NO: 11 (according to the Kabat definition system), and a CDR-L3 having the amino acid sequence of SEQ ID NO: 6 (according to the Kabat definition system), and is at least 75% (e.g., 75%, 80%, 85%, 90%, 95%, 98%, or 99%) identical in the framework regions to the VL as set forth in any one of SEQ ID NO: 18.

[0165] In some embodiments, the humanized anti-TfR antibody of the present disclosure comprises a humanized VH comprising a CDR-H1 having the amino acid sequence of SEQ ID NO: 12 (according to the Chothia definition system), a CDR-H2 having the amino acid sequence of SEQ ID NO: 13, SEQ ID NO: 21, or SEQ ID NO: 25 (according to the Chothia definition system), a CDR-H3 having the amino acid sequence of SEQ ID NO: 14 (according to the Chothia definition system), and containing no more than 25 amino acid variations (e.g., no more than 25, 24, 23, 22, 21, 20, 19, 18, 17, 16, 15, 14, 13, 12, 11, 10, 9, 8, 7, 6, 5, 4, 3, 2, or 1 amino acid variation) in the framework regions as compared with the VH as set forth in SEQ ID NO: 17, SEQ ID NO: 22 or SEQ ID NO: 26. Alternatively or in addition (e.g., in addition), the humanized anti-TfR antibody of the present disclosure comprises a humanized VL comprising a CDR-L1 having the amino acid sequence of SEQ ID NO: 15 (according to the Chothia definition system), a CDR-L2 having the amino acid sequence of SEQ ID NO: 5 (according to the Chothia definition system), and a CDR-L3 having the amino acid sequence of SEQ ID NO: 16 (according to the Chothia definition system), and containing no more than 25 amino acid variations (e.g., no more than 25, 24, 23, 22, 21, 20, 19, 18, 17, 16, 15, 14, 13, 12, 11, 10, 9, 8, 7, 6, 5, 4, 3, 2, or 1 amino acid variation) in the framework regions as compared with the VL as set forth in SEQ ID NO: 18.

[0166] In some embodiments, the humanized anti-TfR antibody of the present disclosure comprises a humanized VH comprising a CDR-H1 having the amino acid sequence of SEQ ID NO: 12 (according to the Chothia definition system), a CDR-H2 having the amino acid sequence of SEQ ID NO: 13, SEQ ID NO: 21, or SEQ ID NO: 25 (according to the Chothia definition system), a CDR-H3 having the amino acid sequence of SEQ ID NO: 14 (according to the Chothia definition system), and is at least 75% (e.g., 75%, 80%, 85%, 90%, 95%, 98%, or 99%) identical in the framework regions to the VH as set forth in SEQ ID NO: SEQ ID NO: 17, SEQ ID NO: 22 or SEQ ID NO: 26. Alternatively or in addition (e.g., in addition), the anti-TfR antibody of the present disclosure comprises a humanized VL comprising a CDR-L1 having the amino acid sequence of SEQ ID NO: 15 (according to the Chothia definition system), a CDR-L2 having the amino acid sequence of SEQ ID NO: 5 (according to the Chothia definition system), and a CDR-L3 having the amino acid sequence of SEQ ID NO: 16 (according to the Chothia definition system), and is at least 75% (e.g., 75%, 80%, 85%, 90%, 95%, 98%, or 99%) identical in the framework regions to the VL as set forth in any one of SEQ ID NO: 18.

[0167] In some embodiments, the humanized anti-TfR antibody of the present disclosure comprises a humanized VH comprising a CDR-H1 having the amino acid sequence of SEQ ID NO: 27 (according to the IMGT definition system), a CDR-H2 having the amino acid sequence of SEQ ID NO: 28 (according to the IMGT definition system), a CDR-H3 having the amino acid sequence of SEQ ID NO: 29 (according to the IMGT definition system), and containing no more than 25 amino acid variations (e.g., no more than 25, 24, 23, 22, 21, 20, 19, 18, 17, 16, 15, 14, 13, 12, 11, 10, 9, 8, 7, 6, 5, 4, 3, 2, or 1 amino acid variation) in the framework regions as compared with the VH as set forth in SEQ ID NO: 43. Alternatively or in addition (e.g., in addition), the humanized anti-TfR antibody of the present disclosure comprises a humanized VL comprising a CDR-L1 having the amino acid sequence of SEQ ID NO: 30 (according to the IMGT definition system), a CDR-L2 having the amino acid sequence of SEQ ID NO: 31 (according to the IMGT definition system), and a CDR-L3 having the amino acid sequence of SEQ ID NO: 32 (according to the IMGT definition system), and containing no more than 25 amino acid variations (e.g., no more than 25, 24, 23, 22, 21, 20, 19, 18, 17, 16, 15, 14, 13, 12, 11, 10, 9, 8, 7, 6, 5, 4, 3, 2, or 1 amino acid variation) in the framework regions as compared with the VL as set forth in SEQ ID NO: 44.

[0168] In some embodiments, the humanized anti-TfR antibody of the present disclosure comprises a humanized VH comprising a CDR-H1 having the amino acid sequence of SEQ ID NO: 27 (according to the IMGT definition system), a CDR-H2 having the amino acid sequence of SEQ ID NO: 28 (according to the IMGT definition system), a CDR-H3 having the amino acid sequence of SEQ ID NO: 29 (according to the IMGT definition system), and is at least 75% (e.g., 75%, 80%, 85%, 90%, 95%, 98%, or 99%) identical in the framework regions to the VH as set forth in SEQ ID NO: 43. Alternatively or in addition (e.g., in addition), the humanized anti-TfR antibody of the present disclosure comprises a humanized VL comprising a CDR-L1 having the amino acid sequence of SEQ ID NO: 30 (according to the IMGT definition system), a CDR-L2 having the amino acid sequence of SEQ ID NO: 31 (according to the IMGT definition system), and a CDR-L3 having the amino acid sequence of SEQ ID NO: 32 (according to the IMGT definition system), and is at least 75% (e.g., 75%, 80%, 85%, 90%, 95%, 98%, or 99%) identical in the framework regions to the VL as set forth in SEQ ID NO: 44.

[0169] In some embodiments, the humanized anti-TfR antibody of the present disclosure comprises a humanized VH comprising a CDR-H1 having the amino acid sequence of SEQ ID NO: 33 (according to the Kabat definition system), a CDR-H2 having the amino acid sequence of SEQ ID NO: 34 (according to the Kabat definition system), a CDR-H3 having the amino acid sequence of SEQ ID NO: 35 (according to the Kabat definition system), and containing no more than 25 amino acid variations (e.g., no more than 25, 24, 23, 22, 21, 20, 19, 18, 17, 16, 15, 14, 13, 12, 11, 10, 9, 8, 7, 6, 5, 4, 3, 2, or 1 amino acid variation) in the framework regions as compared with the VH as set forth in SEQ ID NO: 43. Alternatively or in addition (e.g., in addition), the humanized anti-TfR antibody of the present disclosure comprises a humanized VL comprising a CDR-L1 having the amino acid sequence of SEQ ID NO: 36 (according to the Kabat definition system), a CDR-L2 having the amino acid sequence of SEQ ID NO: 37 (according to the Kabat definition system), and a CDR-L3 having the amino acid sequence of SEQ ID NO: 32 (according to the Kabat definition system), and containing no more than 25 amino acid variations (e.g., no more than 25, 24, 23, 22, 21, 20, 19, 18, 17, 16, 15, 14, 13, 12, 11, 10, 9, 8, 7, 6, 5, 4, 3, 2, or 1 amino acid variation) in the framework regions as compared with the VL as set forth in SEQ ID NO: 44.

[0170] In some embodiments, the humanized anti-TfR antibody of the present disclosure comprises a humanized VH comprising a CDR-H1 having the amino acid sequence of SEQ ID NO: 33 (according to the Kabat definition system), a CDR-H2 having the amino acid sequence of SEQ ID NO: 34 (according to the Kabat definition system), a CDR-H3 having the amino acid sequence of SEQ ID NO: 35 (according to the Kabat definition system), and is at least 75% (e.g., 75%, 80%, 85%, 90%, 95%, 98%, or 99%) identical in the framework regions to the VH as set forth in SEQ ID NO: 43. Alternatively or in addition (e.g., in addition), the humanized anti-TfR antibody of the present disclosure comprises a humanized VL comprising a CDR-L1 having the amino acid sequence of SEQ ID NO: 36 (according to the Kabat definition system), a CDR-L2 having the amino acid sequence of SEQ ID NO: 37 (according to the Kabat definition system), and a CDR-L3 having the amino acid sequence of SEQ ID NO: 32 (according to the Kabat definition system), and is at least 75% (e.g., 75%, 80%, 85%, 90%, 95%, 98%, or 99%) identical in the framework regions to the VL as set forth in SEQ ID NO: 44.

[0171] In some embodiments, the humanized anti-TfR antibody of the present disclosure comprises a humanized VH comprising a CDR-H1 having the amino acid sequence of SEQ ID NO: 38 (according to the Chothia definition system), a CDR-H2 having the amino acid sequence of SEQ ID NO: 39 (according to the Chothia definition system), a CDR-H3 having the amino acid sequence of SEQ ID NO: 40 (according to the Chothia definition system), and containing no more than 25 amino acid variations (e.g., no more than 25, 24, 23, 22, 21, 20, 19, 18, 17, 16, 15, 14, 13, 12, 11, 10, 9, 8, 7, 6, 5, 4, 3, 2, or 1 amino acid variation) in the framework regions as compared with the VH as set forth in SEQ ID NO: 43. Alternatively or in addition (e.g., in addition), the humanized anti-TfR antibody of the present disclosure comprises a humanized VL comprising a CDR-L1 having the amino acid sequence of SEQ ID NO: 41 (according to the Chothia definition system), a CDR-L2 having the amino acid sequence of SEQ ID NO: 31 (according to the Chothia definition system), and a CDR-L3 having the amino acid sequence of SEQ ID NO: 42 (according to the Chothia definition system), and containing no more than 25 amino acid variations (e.g., no more than 25, 24, 23, 22, 21, 20, 19, 18, 17, 16, 15, 14, 13, 12, 11, 10, 9, 8, 7, 6, 5, 4, 3, 2, or 1 amino acid variation) in the framework regions as compared with the VL as set forth in SEQ ID NO: 44.

[0172] In some embodiments, the humanized anti-TfR antibody of the present disclosure comprises a humanized VH comprising a CDR-H1 having the amino acid sequence of SEQ ID NO: 38 (according to the Chothia definition system), a CDR-H2 having the amino acid sequence of SEQ ID NO: 39 (according to the Chothia definition system), a CDR-H3 having the amino acid sequence of SEQ ID NO: 40 (according to the Chothia definition system), and is at least 75% (e.g., 75%, 80%, 85%, 90%, 95%, 98%, or 99%) identical in the framework regions to the VH as set forth in SEQ ID NO: 43. Alternatively or in addition (e.g., in addition), the humanized anti-TfR antibody of the present disclosure comprises a humanized VL comprising a CDR-L1 having the amino acid sequence of SEQ ID NO: 41 (according to the Chothia definition system), a CDR-L2 having the amino acid sequence of SEQ ID NO: 31 (according to the Chothia definition system), and a CDR-L3 having the amino acid sequence of SEQ ID NO: 42 (according to the Chothia definition system), and is at least 75% (e.g., 75%, 80%, 85%, 90%, 95%, 98%, or 99%) identical in the framework regions to the VL as set forth in SEQ ID NO: 44.

[0173] In some embodiments, the humanized anti-TfR antibody of the present disclosure comprises a humanized VH comprising a CDR-H1 having the amino acid sequence of SEQ ID NO: 45, SEQ ID NO: 63, or SEQ ID NO: 66 (according to the IMGT definition system), a CDR-H2 having the amino acid sequence of SEQ ID NO: 46 (according to the IMGT definition system), a CDR-H3 having the amino acid sequence of SEQ ID NO: 47 (according to the IMGT definition system), and containing no more than 25 amino acid variations (e.g., no more than 25, 24, 23, 22, 21, 20, 19, 18, 17, 16, 15, 14, 13, 12, 11, 10, 9, 8, 7, 6, 5, 4, 3, 2, or 1 amino acid variation) in the framework regions as compared with the VH as set forth in SEQ ID NO: 61, SEQ ID NO: 65, or SEQ ID NO: 68. Alternatively or in addition (e.g., in addition), the humanized anti-TfR antibody of the present disclosure comprises a humanized VL comprising a CDR-L1 having the amino acid sequence of SEQ ID NO: 48 (according to the IMGT definition system), a CDR-L2 having the amino acid sequence of SEQ ID NO: 49 (according to the IMGT definition system), and a CDR-L3 having the amino acid sequence of SEQ ID NO: 50 (according to the IMGT definition system), and containing no more than 25 amino acid variations (e.g., no more than 25, 24, 23, 22, 21, 20, 19, 18, 17, 16, 15, 14, 13, 12, 11, 10, 9, 8, 7, 6, 5, 4, 3, 2, or 1 amino acid variation) in the framework regions as compared with the VL as set forth in SEQ ID NO: 62.

[0174] In some embodiments, the humanized anti-TfR antibody of the present disclosure comprises a humanized VH comprising a CDR-H1 having the amino acid sequence of SEQ ID NO: 45, SEQ ID NO: 63, or SEQ ID NO: 66 (according to the IMGT definition system), a CDR-H2 having the amino acid sequence of SEQ ID NO: 46 (according to the IMGT definition system), a CDR-H3 having the amino acid sequence of SEQ ID NO: 47 (according to the IMGT definition system), and is at least 75% (e.g., 75%, 80%, 85%, 90%, 95%, 98%, or 99%) identical in the framework regions to the VH as set forth in SEQ ID NO: 61, SEQ ID NO: 65, SEQ ID NO: 68. Alternatively or in addition (e.g., in addition), the humanized anti-TfR antibody of the present disclosure comprises a humanized VL comprising a CDR-L1 having the amino acid sequence of SEQ ID NO: 48 (according to the IMGT definition system), a CDR-L2 having the amino acid sequence of SEQ ID NO: 49 (according to the IMGT definition system), and a CDR-L3 having the amino acid sequence of SEQ ID NO: 50 (according to the IMGT definition system), and is at least 75% (e.g., 75%, 80%, 85%, 90%, 95%, 98%, or 99%) identical in the framework regions to the VL as set forth in SEQ ID NO: 62.

[0175] In some embodiments, the humanized anti-TfR antibody of the present disclosure comprises a humanized VH comprising a CDR-H1 having the amino acid sequence of SEQ ID NO: 51, SEQ ID NO: 64, or SEQ ID NO: 67 (according to the Kabat definition system), a CDR-H2 having the amino acid sequence of SEQ ID NO: 52 (according to the Kabat definition system), a CDR-H3 having the amino acid sequence of SEQ ID NO: 53 (according to the Kabat definition system), and containing no more than 25 amino acid variations (e.g., no more than 25, 24, 23, 22, 21, 20, 19, 18, 17, 16, 15, 14, 13, 12, 11, 10, 9, 8, 7, 6, 5, 4, 3, 2, or 1 amino acid variation) in the framework regions as compared with the VH as set forth in SEQ ID NO: 61, SEQ ID NO: 65, SEQ ID NO: 68. Alternatively or in addition (e.g., in addition), the humanized anti-TfR antibody of the present disclosure comprises a humanized VL comprising a CDR-L1 having the amino acid sequence of SEQ ID NO: 54 (according to the Kabat definition system), a CDR-L2 having the amino acid sequence of SEQ ID NO: 55 (according to the Kabat definition system), and a CDR-L3 having the amino acid sequence of SEQ ID NO: 50 (according to the Kabat definition system), and containing no more than 25 amino acid variations (e.g., no more than 25, 24, 23, 22, 21, 20, 19, 18, 17, 16, 15, 14, 13, 12, 11, 10, 9, 8, 7, 6, 5, 4, 3, 2, or 1 amino acid variation) in the framework regions as compared with the VL as set forth in SEQ ID NO: 62.

[0176] In some embodiments, the humanized anti-TfR antibody of the present disclosure comprises a humanized VH comprising a CDR-H1 having the amino acid sequence of SEQ ID NO: 51, SEQ ID NO: 64, or SEQ ID NO: 67 (according to the Kabat definition system), a CDR-H2 having the amino acid sequence of SEQ ID NO: 52 (according to the Kabat definition system), a CDR-H3 having the amino acid sequence of SEQ ID NO: 53 (according to the Kabat definition system), and is at least 75% (e.g., 75%, 80%, 85%, 90%, 95%, 98%, or 99%) identical in the framework regions to the VH as set forth in SEQ ID NO: 61, SEQ ID NO: 65, SEQ ID NO: 68. Alternatively or in addition (e.g., in addition), the humanized anti-TfR antibody of the present disclosure comprises a humanized VL comprising a CDR-L1 having the amino acid sequence of SEQ ID NO: 54 (according to the Kabat definition system), a CDR-L2 having the amino acid sequence of SEQ ID NO: 55 (according to the Kabat definition system), and a CDR-L3 having the amino acid sequence of SEQ ID NO: 50 (according to the Kabat definition system), and is at least 75% (e.g., 75%, 80%, 85%, 90%, 95%, 98%, or 99%) identical in the framework regions to the VL as set forth in SEQ ID NO: 62.

[0177] In some embodiments, the humanized anti-TfR antibody of the present disclosure comprises a humanized VH comprising a CDR-H1 having the amino acid sequence of SEQ ID NO: 56 (according to the Chothia definition system), a CDR-H2 having the amino acid sequence of SEQ ID NO: 57 (according to the Chothia definition system), a CDR-H3 having the amino acid sequence of SEQ ID NO: 58 (according to the Chothia definition system), and containing no more than 25 amino acid variations (e.g., no more than 25, 24, 23, 22, 21, 20, 19, 18, 17, 16, 15, 14, 13, 12, 11, 10, 9, 8, 7, 6, 5, 4, 3, 2, or 1 amino acid variation) in the framework regions as compared with the VH as set forth in SEQ ID NO: 61, SEQ ID NO: 65, SEQ ID NO: 68. Alternatively or in addition (e.g., in addition), the humanized anti-TfR antibody of the present disclosure comprises a humanized VL comprising a CDR-L1 having the amino acid sequence of SEQ ID NO: 59 (according to the Chothia definition system), a CDR-L2 having the amino acid sequence of SEQ ID NO: 49 (according to the Chothia definition system), and a CDR-L3 having the amino acid sequence of SEQ ID NO: 60 (according to the Chothia definition system), and containing no more than 25 amino acid variations (e.g., no more than 25, 24, 23, 22, 21, 20, 19, 18, 17, 16, 15, 14, 13, 12, 11, 10, 9, 8, 7, 6, 5, 4, 3, 2, or 1 amino acid variation) in the framework regions as compared with the VL as set forth in SEQ ID NO: 62.

[0178] In some embodiments, the humanized anti-TfR antibody of the present disclosure comprises a humanized VH comprising a CDR-H1 having the amino acid sequence of SEQ ID NO: 56 (according to the Chothia definition system), a CDR-H2 having the amino acid sequence of SEQ ID NO: 57 (according to the Chothia definition system), a CDR-H3 having the amino acid sequence of SEQ ID NO: 58 (according to the Chothia definition system), and is at least 75% (e.g., 75%, 80%, 85%, 90%, 95%, 98%, or 99%) identical in the framework regions to the VH as set forth in SEQ ID NO: 61, SEQ ID NO: 65, SEQ ID NO: 68. Alternatively or in addition (e.g., in addition), the humanized anti-TfR antibody of the present disclosure comprises a humanized VL comprising a CDR-L1 having the amino acid sequence of SEQ ID NO: 59 (according to the Chothia definition system), a CDR-L2 having the amino acid sequence of SEQ ID NO: 49 (according to the Chothia definition system), and a CDR-L3 having the amino acid sequence of SEQ ID NO: 60 (according to the Chothia definition system), and is at least 75% (e.g., 75%, 80%, 85%, 90%, 95%, 98%, or 99%) identical in the framework regions to the VL as set forth in SEQ ID NO: 62.

[0179] Examples of amino acid sequences of the humanized anti-TfR antibodies described herein are provided in Table 3.

TABLE 3
Variable Regions of Humanized Anti-TfR Antibodies

| Antibody | Variable Region Amino Acid Sequence** |
|---|---|
| 3A4 | V_{H}: |
| VH3 (N54T*)/Vκ4 | EVQLVQSGSELKKPGASVKVSCTASGFNIKDDYMYWVRQPPGKGLEWIGWID |
| | PETGDTEYASKFQDRVTVTADTSTNTAYMELSSLRSEDTAVYYCTLWLRRGL |
| | DYWGQGTLVTVSS (SEQ ID NO: 69) |
| | V_{L}: |
| | DIVMTQSPLSLPVTPGEPASISCRSSKSLLHSNGYTYLFWFQQRPGQSPRLLIYR |
| | MSNLASGVPDRFSGSGSGTDFTLKISRVEAEDVGVYYCMQHLEYPFTFGGGT |
| | KVEIK (SEQ ID NO: 70) |
| 3A4 | V_{H}: |
| VH3 (N54S*)/Vκ4 | EVQLVQSGSELKKPGASVKVSCTASGFNIKDDYMYWVRQPPGKGLEWIGWID |
| | PESGDTEYASKFQDRVTVTADTSTNTAYMELSSLRSEDTAVYYCTLWLRRGL |
| | DYWGQGTLVTVSS (SEQ ID NO: 71) |
| | V_{L}: |
| | DIVMTQSPLSLPVTPGEPASISCRSSKSLLHSNGYTYLFWFQQRPGQSPRLLIYR |
| | MSNLASGVPDRFSGSGSGTDFTLKISRVEAEDVGVYYCMQHLEYPFTFGGGT |
| | KVEIK (SEQ ID NO: 70) |
| 3A4 | VH: |
| VH3/Vκ4 | EVQLVQSGSELKKPGASVKVSCTASGFNIKDDYMYWVRQPPGKGLEWIGWID |
| | PENGDTEYASKFQDRVTVTADTSTNTAYMELSSLRSEDTAVYYCTLWLRRGL |
| | DYWGQGTLVTVSS (SEQ ID NO: 72) |
| | VL: |
| | DIVMTQSPLSLPVTPGEPASISCRSSKSLLHSNGYTYLFWFQQRPGQSPRLLIYR |
| | MSNLASGVPDRFSGSGSGTDFTLKISRVEAEDVGVYYCMQHLEYPFTFGGGT |
| | KVEIK (SEQ ID NO: 70) |
| 3M12 | VH: |
| VH3/Vκ2 | QVQLQESGPGLVKPSQTLSLTCSVTGYSITSGYYWNWIRQPPGKGLEWMGYIT |
| | FDGANNYNPSLKNRVSISRDTSKNQFSLKLSSVTAEDTATYYCTRSSYDYDVL |
| | DYWGQGTTVTVSS (SEQ ID NO: 73) |
| | VL: |
| | DIQMTQSPSSLSASVGDRVTITCRASQDISNFLNWYQQKPGQPVKLLIYYTSRL |
| | HSGVPSRFSGSGSGTDFTLTISSLQPEDFATYFCQQGHTLPYTFGQGTKLEIK |
| | (SEQ ID NO: 74) |
| 3M12 | VH: |
| VH3/Vκ3 | QVQLQESGPGLVKPSQTLSLTCSVTGYSITSGYYWNWIRQPPGKGLEWMGYIT |
| | FDGANNYNPSLKNRVSISRDTSKNQFSLKLSSVTAEDTATYYCTRSSYDYDVL |
| | DYWGQGTTVTVSS (SEQ ID NO: 73) |
| | VL: |
| | DIQMTQSPSSLSASVGDRVTITCRASQDISNFLNWYQQKPGQPVKLLIYYTSRL |
| | HSGVPSRFSGSGSGTDFTLTISSLQPEDFATYYCQQGHTLPYTFGQGTKLEIK |
| | (SEQ ID NO: 75) |
| 3M12 | VH: |
| VH4/Vκ2 | QVQLQESGPGLVKPSQTLSLTCTVTGYSITSGYYWNWIRQPPGKGLEWIGYITF |
| | DGANNYNPSLKNRVSISRDTSKNQFSLKLSSVTAEDTATYYCTRSSYDYDVLD |
| | YWGQGTTVTVSS (SEQ ID NO: 76) |
| | VL: |
| | DIQMTQSPSSLSASVGDRVTITCRASQDISNFLNWYQQKPGQPVKLLIYYTSRL |
| | HSGVPSRFSGSGSGTDFTLTISSLQPEDFATYFCQQGHTLPYTFGQGTKLEIK |
| | (SEQ ID NO: 74) |
| 3M12 | VH: |
| VH4/Vκ3 | QVQLQESGPGLVKPSQTLSLTCTVTGYSITSGYYWNWIRQPPGKGLEWIGYITF |
| | DGANNYNPSLKNRVSISRDTSKNQFSLKLSSVTAEDTATYYCTRSSYDYDVLD |
| | YWGQGTTVTVSS (SEQ ID NO: 76) |
| | VL: |
| | DIQMTQSPSSLSASVGDRVTITCRASQDISNFLNWYQQKPGQPVKLLIYYTSRL |
| | HSGVPSRFSGSGSGTDFTLTISSLQPEDFATYYCQQGHTLPYTFGQGTKLEIK |
| | (SEQ ID NO: 75) |
| 5H12 | VH: |
| VH5(C33Y*)/Vκ3 | QVQLVQSGAEVKKPGASVKVSCKASGYSFTDYYINWVRQAPGQGLEWMGWI |
| | YPGSGNTRYSERFKGRVTITRDTSASTAYMELSSLRSEDTAVYYCAREDYYPY |
| | HGMDYWGQGTLVTVSS (SEQ ID NO: 77) |
| | VL: |
| | DIVLTQSPDSLAVSLGERATINCRASESVDGYDNSFMHWYQQKPGQPPKLLIFR |
| | ASNLESGVPDRFSGSGSRTDFTLTISSLQAEDVAVYYCQQSSEDPWTFGQGTK |
| | LEIK (SEQ ID NO: 78) |
| 5H12 | VH: |
| VH5 (C33D*)/Vκ4 | QVQLVQSGAEVKKPGASVKVSCKASGYSFTDYDINWVRQAPGQGLEWMGWI |
| | YPGSGNTRYSERFKGRVTITRDTSASTAYMELSSLRSEDTAVYYCAREDYYPY |
| | HGMDYWGQGTLVTVSS (SEQ ID NO: 79) |
| | VL: |
| | DIVMTQSPDSLAVSLGERATINCRASESVDGYDNSFMHWYQQKPGQPPKLLIF |
| | RASNLESGVPDRFSGSGSGTDFTLTISSLQAEDVAVYYCQQSSEDPWTFGQGT |
| | KLEIK (SEQ ID NO: 80) |
| 5H12 | VH: |
| VH5 (C33Y*)/Vκ4 | QVQLVQSGAEVKKPGASVKVSCKASGYSFTDYYINWVRQAPGQGLEWMGWI |
| | YPGSGNTRYSERFKGRVTITRDTSASTAYMELSSLRSEDTAVYYCAREDYYPY |
| | HGMDYWGQGTLVTVSS (SEQ ID NO: 77) |
| | VL: |
| | DIVMTQSPDSLAVSLGERATINCRASESVDGYDNSFMHWYQQKPGQPPKLLIF |
| | RASNLESGVPDRFSGSGSGTDFTLTISSLQAEDVAVYYCQQSSEDPWTFGQGT |
| | KLEIK (SEQ ID NO: 80) |

*mutation positions are according to Kabat numbering of the respective VH sequences containing the mutations
**CDRs according to the Kabat numbering system are bolded

[0180] In some embodiments, the humanized anti-TfR antibody of the present disclosure comprises a humanized VH comprising the CDR-H1, CDR-H2, and CDR-H3 of any one of the anti-TfR antibodies provided in Table 2 and comprises one or more (e.g., 1, 2, 3, 4, 5, 6, 7, 8, 9, 10 or more) amino acid variations in the framework regions as compared with the respective humanized VH provided in Table 3. Alternatively or in addition (e.g., in addition), the humanized anti-TfR antibody of the present disclosure comprises a humanized VL comprising the CDR-L1, CDR-L2, and CDR-L3 of any one of the anti-TfR antibodies provided in Table 2 and comprises one or more (e.g., 1, 2, 3, 4, 5, 6, 7, 8, 9, 10 or more) amino acid variations in the framework regions as compared with the respective humanized VL provided in Table 3.

[0181] In some embodiments, the humanized anti-TfR antibody of the present disclosure comprises a humanized VH comprising an amino acid sequence that is at least 80% (e.g., 80%, 85%, 90%, 95%, 98%, or 99%) identical to SEQ ID NO: 69, and/or (e.g., and) a humanized VL comprising an amino acid sequence that is at least 80% identical (e.g., 80%, 85%, 90%, 95%, 98%, or 99%) to SEQ ID NO: 70. In some embodiments, the humanized anti-TfR antibody of the present disclosure comprises a humanized VH comprising the amino acid sequence of SEQ ID NO: 69 and a humanized VL comprising the amino acid sequence of SEQ ID NO: 70.

[0182] In some embodiments, the humanized anti-TfR antibody of the present disclosure comprises a humanized VH comprising an amino acid sequence that is at least 80% (e.g., 80%, 85%, 90%, 95%, 98%, or 99%) identical to SEQ ID NO: 71, and/or (e.g., and) a humanized VL comprising an amino acid sequence that is at least 80% identical (e.g., 80%, 85%, 90%, 95%, 98%, or 99%) to SEQ ID NO: 70. In some embodiments, the humanized anti-TfR antibody of the present disclosure comprises a humanized VH comprising the amino acid sequence of SEQ ID NO: 71 and a humanized VL comprising the amino acid sequence of SEQ ID NO: 70.

[0183] In some embodiments, the humanized anti-TfR antibody of the present disclosure comprises a humanized VH comprising an amino acid sequence that is at least 80% (e.g., 80%, 85%, 90%, 95%, 98%, or 99%) identical to SEQ ID NO: 72, and/or (e.g., and) a humanized VL comprising an amino acid sequence that is at least 80% identical (e.g., 80%, 85%, 90%, 95%, 98%, or 99%) to SEQ ID NO: 70. In some embodiments, the humanized anti-TfR antibody of the present disclosure comprises a humanized VH comprising the amino acid sequence of SEQ ID NO: 72 and a humanized VL comprising the amino acid sequence of SEQ ID NO: 70.

[0184] In some embodiments, the humanized anti-TfR antibody of the present disclosure comprises a humanized VH comprising an amino acid sequence that is at least 80% (e.g., 80%, 85%, 90%, 95%, 98%, or 99%) identical to SEQ ID NO: 73, and/or (e.g., and) a humanized VL comprising an amino acid sequence that is at least 80% identical (e.g., 80%, 85%, 90%, 95%, 98%, or 99%) to SEQ ID NO: 74. In some embodiments, the humanized anti-TfR antibody of the present disclosure comprises a humanized VH comprising the amino acid sequence of SEQ ID NO: 73 and a humanized VL comprising the amino acid sequence of SEQ ID NO: 74.

[0185] In some embodiments, the humanized anti-TfR antibody of the present disclosure comprises a humanized VH comprising an amino acid sequence that is at least 80% (e.g., 80%, 85%, 90%, 95%, 98%, or 99%) identical to SEQ ID NO: 73, and/or (e.g., and) a humanized VL comprising an amino acid sequence that is at least 80% identical (e.g., 80%, 85%, 90%, 95%, 98%, or 99%) to SEQ ID NO: 75. In some embodiments, the humanized anti-TfR antibody of the present disclosure comprises a humanized VH comprising the amino acid sequence of SEQ ID NO: 73 and a humanized VL comprising the amino acid sequence of SEQ ID NO: 75.

[0186] In some embodiments, the humanized anti-TfR antibody of the present disclosure comprises a humanized VH comprising an amino acid sequence that is at least 80% (e.g., 80%, 85%, 90%, 95%, 98%, or 99%) identical to SEQ ID NO: 76, and/or (e.g., and) a humanized VL comprising an amino acid sequence that is at least 80% identical (e.g., 80%, 85%, 90%, 95%, 98%, or 99%) to SEQ ID NO: 74. In some embodiments, the humanized anti-TfR antibody of the present disclosure comprises a humanized VH comprising the amino acid sequence of SEQ ID NO: 76 and a humanized VL comprising the amino acid sequence of SEQ ID NO: 74.

[0187] In some embodiments, the humanized anti-TfR antibody of the present disclosure comprises a humanized VH comprising an amino acid sequence that is at least 80% (e.g., 80%, 85%, 90%, 95%, 98%, or 99%) identical to SEQ ID NO: 76, and/or (e.g., and) a humanized VL comprising an amino acid sequence that is at least 80% identical (e.g., 80%, 85%, 90%, 95%, 98%, or 99%) to SEQ ID NO: 75. In some embodiments, the humanized anti-TfR antibody of the present disclosure comprises a humanized VH comprising the amino acid sequence of SEQ ID NO: 76 and a humanized VL comprising the amino acid sequence of SEQ ID NO: 75.

[0188] In some embodiments, the humanized anti-TfR antibody of the present disclosure comprises a humanized VH comprising an amino acid sequence that is at least 80% (e.g., 80%, 85%, 90%, 95%, 98%, or 99%) identical to SEQ ID NO: 77, and/or (e.g., and) a humanized VL comprising an amino acid sequence that is at least 80% identical (e.g., 80%, 85%, 90%, 95%, 98%, or 99%) to SEQ ID NO: 78. In some embodiments, the humanized anti-TfR antibody of the present disclosure comprises a humanized VH comprising the amino acid sequence of SEQ ID NO: 77 and a humanized VL comprising the amino acid sequence of SEQ ID NO: 78.

[0189] In some embodiments, the humanized anti-TfR antibody of the present disclosure comprises a humanized VH comprising an amino acid sequence that is at least 80% (e.g., 80%, 85%, 90%, 95%, 98%, or 99%) identical to SEQ ID NO: 79, and/or (e.g., and) a humanized VL comprising an amino acid sequence that is at least 80% identical (e.g., 80%, 85%, 90%, 95%, 98%, or 99%) to SEQ ID NO: 80. In some embodiments, the humanized anti-TfR antibody of the present disclosure comprises a humanized VH comprising the amino acid sequence of SEQ ID NO: 79 and a humanized VL comprising the amino acid sequence of SEQ ID NO: 80.

[0190] In some embodiments, the humanized anti-TfR antibody of the present disclosure comprises a humanized VH comprising an amino acid sequence that is at least 80% (e.g., 80%, 85%, 90%, 95%, 98%, or 99%) identical to SEQ ID NO: 77, and/or (e.g., and) a humanized VL comprising an amino acid sequence that is at least 80% identical (e.g., 80%, 85%, 90%, 95%, 98%, or 99%) to SEQ ID NO: 80. In some embodiments, the humanized anti-TfR antibody of the present disclosure comprises a humanized VH comprising the amino acid sequence of SEQ ID NO: 77 and a humanized VL comprising the amino acid sequence of SEQ ID NO: 80.

[0191] In some embodiments, the humanized anti-TfR antibody described herein is a full-length IgG, which can include a heavy constant region and a light constant region from a human antibody. In some embodiments, the heavy chain of any of the anti-TfR antibodies as described herein may comprises a heavy chain constant region (CH) or a portion thereof (e.g., CH1, CH2, CH3, or a combination thereof). The heavy chain constant region can of any suitable origin, e.g., human, mouse, rat, or rabbit. In one specific example, the heavy chain constant region is from a human IgG (a gamma heavy chain), e.g., IgG1, IgG2, or IgG4. An example of a human IgG1 constant region is given below:

(SEQ ID NO: 81)
[sequence omitted]

[0192] In some embodiments, the heavy chain of any of the anti-TfR antibodies described herein comprises a mutant human IgG1 constant region. For example, the introduction of LALA mutations (a mutant derived from mAb b12 that has been mutated to replace the lower hinge residues Leu234 Leu235 with Ala234 and Ala235) in the CH2 domain of human IgG1 is known to reduce Fcg receptor binding (Bruhns, P., et al. (2009) and Xu, D. et al. (2000)). The mutant human IgG1 constant region is provided below (mutations bonded and underlined):

(SEQ ID NO: 82)
ASTKGPSVFPLAPSSKSTSGGTAALGCLVKDYFPEPVTVSWNSGALTSG
VHTFPAVLQSSGLYSLSSVVTVPSSSLGTQTYICNVNHKPSNTKVDKKV
EPKSCDKTHTCPPCPAPEAAGGPSVFLFPPKPKDTLMISRTPEVTCVVV
DVSHEDPEVKFNWYVDGVEVHNAKTKPREEQYNSTYRVVSVLTVLHQDW
LNGKEYKCKVSNKALPAPIEKTISKAKGQPREPQVYTLPPSRDELTKNQ
VSLTCLVKGFYPSDIAVEWESNGQPENNYKTTPPVLDSDGSFFLYSKLT
VDKSRWQQGNVFSCSVMHEALHNHYTQKSLSLSPGK

[0193] In some embodiments, the light chain of any of the anti-TfR antibodies described herein may further comprise a light chain constant region (CL), which can be any CL known in the art. In some examples, the CL is a kappa light chain. In other examples, the CL is a lambda light chain. In some embodiments, the CL is a kappa light chain, the sequence of which is provided below:

RTVAAPSVFIFPPSDEQLKSGTASVVCLLNNFYPREAKVQWKVDNALQS
GNSQESVTEQDSKDSTYSLSSTLTLSKADYEKHKVYACEVTHQGLSSPV
TKSFNRGEC (SEQ ID NO: 83)

[0194] Other antibody heavy and light chain constant regions are well known in the art, e.g., those provided in the IMGT database (www.imgt.org) or at www.vbase2.org/vbstat.php., both of which are incorporated by reference herein.

[0195] In some embodiments, the humanized anti-TfR antibody described herein comprises a heavy chain comprising any one of the VH as listed in Table 3 or any variants thereof and a heavy chain constant region that is at least 80%, at least 85%, at least 90%, at least 95%, or at least 99% identical to SEQ ID NO: 81 or SEQ ID NO: 82. In some embodiments, the humanized anti-TfR antibody described herein comprises a heavy chain comprising any one of the VH as listed in Table 3 or any variants thereof and a heavy chain constant region that contains no more than 25 amino acid variations (e.g., no more than 25, 24, 23, 22, 21, 20, 19, 18, 17, 16, 15, 14, 13, 12, 11, 10, 9, 8, 7, 6, 5, 4, 3, 2, or 1 amino acid variation) as compared with SEQ ID NO: 81 or SEQ ID NO: 82. In some embodiments, the humanized anti-TfR antibody described herein comprises a heavy chain comprising any one of the VH as listed in Table 3 or any variants thereof and a heavy chain constant region as set forth in SEQ ID NO: 81. In some embodiments, the humanized anti-TfR antibody described herein comprises heavy chain comprising any one of the VH as listed in Table 3 or any variants thereof and a heavy chain constant region as set forth in SEQ ID NO: 82.

[0196] In some embodiments, the humanized anti-TfR antibody described herein comprises a light chain comprising any one of the VL as listed in Table 3 or any variants thereof and a light chain constant region that is at least 80%, at least 85%, at least 90%, at least 95%, or at least 99% identical to SEQ ID NO: 83. In some embodiments, the humanized anti-TfR antibody described herein comprises a light chain comprising any one of the VL as listed in Table 3 or any variants thereof and a light chain constant region contains no more than 25 amino acid variations (e.g., no more than 25, 24, 23, 22, 21, 20, 19, 18, 17, 16, 15, 14, 13, 12, 11, 10, 9, 8, 7, 6, 5, 4, 3, 2, or 1 amino acid variation) as compared with SEQ ID NO: 83. In some embodiments, the humanized anti-TfR antibody described herein comprises a light chain comprising any one of the VL as listed in Table 3 or any variants thereof and a light chain constant region set forth in SEQ ID NO: 83.

[0197] Examples of IgG heavy chain and light chain amino acid sequences of the anti-TfR antibodies described are provided in Table 4 below.

[0198] Table 4. Heavy chain and light chain sequences of examples of humanized anti-TfR IgGs

TABLE 4
Heavy chain and light chain sequences of examples of humanized
anti-TfR IgGs

| Antibody | IgG Heavy Chain/Light Chain Sequences** |
|---|---|
| 3A4 | Heavy Chain (with wild type human IgG1 constant region) |
| VH3 (N54T*)/Vκ4 | EVQLVQSGSELKKPGASVKVSCTASGFNIKDDYMYWVRQPPGKGLEWIGWIDP |
| | ETGDTEYASKFQDRVTVTADTSTNTAYMELSSLRSEDTAVYYCTLWLRRGLD |
| | YWGQGTLVTVSSASTKGPSVFPLAPSSKSTSGGTAALGCLVKDYFPEPVTVSWNS |
| | GALTSGVHTFPAVLQSSGLYSLSSVVTVPSSSLGTQTYICNVNHKPSNTKVDKKV |
| | EPKSCDKTHTCPPCPAPELLGGPSVFLFPPKPKDTLMISRTPEVTCVVVDVSHEDP |
| | EVKFNWYVDGVEVHNAKTKPREEQYNSTYRVVSVLTVLHQDWLNGKEYKCKV |
| | SNKALPAPIEKTISKAKGQPREPQVYTLPPSRDELTKNQVSLTCLVKGFYPSDIAV |
| | EWESNGQPENNYKTTPPVLDSDGSFFLYSKLTVDKSRWQQGNVFSCSVMHEALH |
| | NHYTQKSLSLSPGK (SEQ ID NO: 84) |
| | Light Chain (with kappa light chain constant region) |
| | DIVMTQSPLSLPVTPGEPASISCRSSKSLLHSNGYTYLFWFQQRPGQSPRLLIYRM |
| | SNLASGVPDRFSGSGSGTDFTLKISRVEAEDVGVYYCMQHLEYPFTFGGGTKVE |
| | IKRTVAAPSVFIFPPSDEQLKSGTASVVCLLNNFYPREAKVQWKVDNALQSGNSQ |
| | ESVTEQDSKDSTYSLSSTLTLSKADYEKHKVYACEVTHQGLSSPVTKSFNRGEC |
| | (SEQ ID NO: 85) |
| 3A4 | Heavy Chain (with wild type human IgG1 constant region) |
| VH3 (N54S*)/Vκ4 | EVQLVQSGSELKKPGASVKVSCTASGFNIKDDYMYWVRQPPGKGLEWIGWIDP |
| | ESGDTEYASKFQDRVTVTADTSTNTAYMELSSLRSEDTAVYYCTLWLRRGLDY |
| | WGQGTLVTVSSASTKGPSVFPLAPSSKSTSGGTAALGCLVKDYFPEPVTVSWNSG |
| | ALTSGVHTFPAVLQSSGLYSLSSVVTVPSSSLGTQTYICNVNHKPSNTKVDKKVE |
| | PKSCDKTHTCPPCPAPELLGGPSVFLFPPKPKDTLMISRTPEVTCVVVDVSHEDPE |
| | VKFNWYVDGVEVHNAKTKPREEQYNSTYRVVSVLTVLHQDWLNGKEYKCKVS |
| | NKALPAPIEKTISKAKGQPREPQVYTLPPSRDELTKNQVSLTCLVKGFYPSDIAVE |
| | WESNGQPENNYKTTPPVLDSDGSFFLYSKLTVDKSRWQQGNVFSCSVMHEALH |
| | NHYTQKSLSLSPGK (SEQ ID NO: 86) |
| | Light Chain (with kappa light chain constant region) |
| | DIVMTQSPLSLPVTPGEPASISCRSSKSLLHSNGYTYLFWFQQRPGQSPRLLIYRM |
| | SNLASGVPDRFSGSGSGTDFTLKISRVEAEDVGVYYCMQHLEYPFTFGGGTKVE |
| | IKRTVAAPSVFIFPPSDEQLKSGTASVVCLLNNFYPREAKVQWKVDNALQSGNSQ |
| | ESVTEQDSKDSTYSLSSTLTLSKADYEKHKVYACEVTHQGLSSPVTKSFNRGEC |
| | (SEQ ID NO: 85) |
| 3A4 | Heavy Chain (with wild type human IgG1 constant region) |
| VH3/Vκ4 | EVQLVQSGSELKKPGASVKVSCTASGFNIKDDYMYWVRQPPGKGLEWIGWIDP |
| | ENGDTEYASKFQDRVTVTADTSTNTAYMELSSLRSEDTAVYYCTLWLRRGLD |
| | YWGQGTLVTVSSASTKGPSVFPLAPSSKSTSGGTAALGCLVKDYFPEPVTVSWNS |
| | GALTSGVHTFPAVLQSSGLYSLSSVVTVPSSSLGTQTYICNVNHKPSNTKVDKKV |
| | EPKSCDKTHTCPPCPAPELLGGPSVFLFPPKPKDTLMISRTPEVTCVVVDVSHEDP |
| | EVKFNWYVDGVEVHNAKTKPREEQYNSTYRVVSVLTVLHQDWLNGKEYKCKV |
| | SNKALPAPIEKTISKAKGQPREPQVYTLPPSRDELTKNQVSLTCLVKGFYPSDIAV |
| | EWESNGQPENNYKTTPPVLDSDGSFFLYSKLTVDKSRWQQGNVFSCSVMHEALH |
| | NHYTQKSLSLSPGK (SEQ ID NO: 87) |
| | Light Chain (with kappa light chain constant region) |
| | DIVMTQSPLSLPVTPGEPASISCRSSKSLLHSNGYTYLFWFQQRPGQSPRLLIYRM |
| | SNLASGVPDRFSGSGSGTDFTLKISRVEAEDVGVYYCMQHLEYPFTFGGGTKVE |
| | IKRTVAAPSVFIFPPSDEQLKSGTASVVCLLNNFYPREAKVQWKVDNALQSGNSQ |
| | ESVTEQDSKDSTYSLSSTLTLSKADYEKHKVYACEVTHQGLSSPVTKSFNRGEC |
| | (SEQ ID NO: 85) |
| 3M12 | Heavy Chain (with wild type human IgG1 constant region) |
| VH3/Vκ2 | QVQLQESGPGLVKPSQTLSLTCSVTGYSITSGYYWNWIRQPPGKGLEWMGYITF |
| | DGANNYNPSLKNRVSISRDTSKNQFSLKLSSVTAEDTATYYCTRSSYDYDVLDY |
| | WGQGTTVTVSSASTKGPSVFPLAPSSKSTSGGTAALGCLVKDYFPEPVTVSWNSG |
| | ALTSGVHTFPAVLQSSGLYSLSSVVTVPSSSLGTQTYICNVNHKPSNTKVDKKVE |
| | PKSCDKTHTCPPCPAPELLGGPSVFLFPPKPKDTLMISRTPEVTCVVVDVSHEDPE |
| | VKFNWYVDGVEVHNAKTKPREEQYNSTYRVVSVLTVLHQDWLNGKEYKCKVS |
| | NKALPAPIEKTISKAKGQPREPQVYTLPPSRDELTKNQVSLTCLVKGFYPSDIAVE |
| | WESNGQPENNYKTTPPVLDSDGSFFLYSKLTVDKSRWQQGNVFSCSVMHEALH |
| | NHYTQKSLSLSPGK (SEQ ID NO: 88) |
| | Light Chain (with kappa light chain constant region) |
| | DIQMTOSPSSLSASVGDRVTITCRASQDISNFLNWYQQKPGQPVKLLIYYTSRLH |
| | SGVPSRFSGSGSGTDFTLTISSLQPEDFATYFCQQGHTLPYTFGQGTKLEIKRTVA |
| | APSVFIFPPSDEQLKSGTASVVCLLNNFYPREAKVQWKVDNALQSGNSQESVTEQ |
| | DSKDSTYSLSSTLTLSKADYEKHKVYACEVTHQGLSSPVTKSFNRGEC (SEQ ID |
| | NO: 89) |
| 3M12 | Heavy Chain (with wild type human IgG1 constant region) |
| VH3/Vκ3 | QVQLQESGPGLVKPSQTLSLTCSVTGYSITSGYYWNWIRQPPGKGLEWMGYITF |
| | DGANNYNPSLKNRVSISRDTSKNQFSLKLSSVTAEDTATYYCTRSSYDYDVLDY |
| | WGQGTTVTVSSASTKGPSVFPLAPSSKSTSGGTAALGCLVKDYFPEPVTVSWNSG |
| | ALTSGVHTFPAVLQSSGLYSLSSVVTVPSSSLGTQTYICNVNHKPSNTKVDKKVE |
| | PKSCDKTHTCPPCPAPELLGGPSVFLFPPKPKDTLMISRTPEVTCVVVDVSHEDPE |
| | VKFNWYVDGVEVHNAKTKPREEQYNSTYRVVSVLTVLHQDWLNGKEYKCKVS |
| | NKALPAPIEKTISKAKGQPREPQVYTLPPSRDELTKNQVSLTCLVKGFYPSDIAVE |
| | WESNGQPENNYKTTPPVLDSDGSFFLYSKLTVDKSRWQQGNVFSCSVMHEALH |
| | NHYTQKSLSLSPGK (SEQ ID NO: 88) |
| | Light Chain (with kappa light chain constant region) |
| | DIQMTQSPSSLSASVGDRVTITCRASQDISNFLNWYQQKPGQPVKLLIYYTSRLH |
| | SGVPSRFSGSGSGTDFTLTISSLQPEDFATYYCQQGHTLPYTFGQGTKLEIKRTVA |
| | APSVFIFPPSDEQLKSGTASVVCLLNNFYPREAKVQWKVDNALQSGNSQESVTEQ |
| | DSKDSTYSLSSTLTLSKADYEKHKVYACEVTHQGLSSPVTKSFNRGEC (SEQ ID |
| | NO: 90) |
| 3M12 | Heavy Chain (with wild type human IgG1 constant region) |
| VH4/Vκ2 | QVQLQESGPGLVKPSQTLSLTCTVTGYSITSGYYWNWIRQPPGKGLEWIGYITFD |
| | GANNYNPSLKNRVSISRDTSKNQFSLKLSSVTAEDTATYYCTRSSYDYDVLDYW |
| | GQGTTVTVSSASTKGPSVFPLAPSSKSTSGGTAALGCLVKDYFPEPVTVSWNSGA |
| | LTSGVHTFPAVLQSSGLYSLSSVVTVPSSSLGTQTYICNVNHKPSNTKVDKKVEP |
| | KSCDKTHTCPPCPAPELLGGPSVFLFPPKPKDTLMISRTPEVTCVVVDVSHEDPEV |
| | KFNWYVDGVEVHNAKTKPREEQYNSTYRVVSVLTVLHQDWLNGKEYKCKVSN |
| | KALPAPIEKTISKAKGQPREPQVYTLPPSRDELTKNQVSLTCLVKGFYPSDIAVEW |
| | ESNGQPENNYKTTPPVLDSDGSFFLYSKLTVDKSRWQQGNVFSCSVMHEALHNH |
| | YTQKSLSLSPGK (SEQ ID NO: 91) |
| | Light Chain (with kappa light chain constant region) |
| | DIQMTQSPSSLSASVGDRVTITCRASQDISNFLNWYQQKPGQPVKLLIYYTSRLH |
| | SGVPSRFSGSGSGTDFTLTISSLQPEDFATYFCQQGHTLPYTFGQGTKLEIKRTVA |
| | APSVFIFPPSDEQLKSGTASVVCLLNNFYPREAKVQWKVDNALQSGNSQESVTEQ |
| | DSKDSTYSLSSTLTLSKADYEKHKVYACEVTHQGLSSPVTKSFNRGEC (SEQ ID |
| | NO: 89) |
| 3M12 | Heavy Chain (with wild type human IgG1 constant region) |
| VH4/Vκ3 | QVQLQESGPGLVKPSQTLSLTCTVTGYSITSGYYWNWIRQPPGKGLEWIGYITFD |
| | GANNYNPSLKNRVSISRDTSKNQFSLKLSSVTAEDTATYYCTRSSYDYDVLDYW |
| | GQGTTVTVSSASTKGPSVFPLAPSSKSTSGGTAALGCLVKDYFPEPVTVSWNSGA |
| | LTSGVHTFPAVLQSSGLYSLSSVVTVPSSSLGTQTYICNVNHKPSNTKVDKKVEP |
| | KSCDKTHTCPPCPAPELLGGPSVFLFPPKPKDTLMISRTPEVTCVVVDVSHEDPEV |
| | KFNWYVDGVEVHNAKTKPREEQYNSTYRVVSVLTVLHQDWLNGKEYKCKVSN |
| | KALPAPIEKTISKAKGQPREPQVYTLPPSRDELTKNQVSLTCLVKGFYPSDIAVEW |
| | ESNGQPENNYKTTPPVLDSDGSFFLYSKLTVDKSRWQQGNVFSCSVMHEALHNH |
| | YTQKSLSLSPGK (SEQ ID NO: 91) |
| | Light Chain (with kappa light chain constant region) |
| | DIQMTQSPSSLSASVGDRVTITCRASQDISNFLNWYQQKPGQPVKLLIYYTSRLH |
| | SGVPSRFSGSGSGTDFTLTISSLQPEDFATYYCQQGHTLPYTFGQGTKLEIKRTVA |
| | APSVFIFPPSDEQLKSGTASVVCLLNNFYPREAKVQWKVDNALQSGNSQESVTEQ |
| | DSKDSTYSLSSTLTLSKADYEKHKVYACEVTHQGLSSPVTKSFNRGEC (SEQ ID |
| | NO: 90) |
| 5H12 | Heavy Chain (with wild type human IgG1 constant region) |
| VH5 (C33Y*)/Vκ3 | QVQLVQSGAEVKKPGASVKVSCKASGYSFTDYYINWVRQAPGQGLEWMGWIY |
| | PGSGNTRYSERFKGRVTITRDTSASTAYMELSSLRSEDTAVYYCAREDYYPYH |
| | GMDYWGQGTLVTVSSASTKGPSVFPLAPSSKSTSGGTAALGCLVKDYFPEPVTV |
| | SWNSGALTSGVHTFPAVLQSSGLYSLSSVVTVPSSSLGTQTYICNVNHKPSNTKV |
| | DKKVEPKSCDKTHTCPPCPAPELLGGPSVFLFPPKPKDTLMISRTPEVTCVVVDVS |
| | HEDPEVKFNWYVDGVEVHNAKTKPREEQYNSTYRVVSVLTVLHQDWLNGKEY |
| | KCKVSNKALPAPIEKTISKAKGQPREPQVYTLPPSRDELTKNQVSLTCLVKGFYPS |
| | DIAVEWESNGQPENNYKTTPPVLDSDGSFFLYSKLTVDKSRWQQGNVFSCSVMH |
| | EALHNHYTQKSLSLSPGK (SEQ ID NO: 92) |
| | Light Chain (with kappa light chain constant region) |
| | DIVLTQSPDSLAVSLGERATINCRASESVDGYDNSFMHWYQQKPGQPPKLLIFRA |
| | SNLESGVPDRESGSGSRTDFTLTISSLQAEDVAVYYCQQSSEDPWTFGQGTKLEI |
| | KRTVAAPSVFIFPPSDEQLKSGTASVVCLLNNFYPREAKVQWKVDNALQSGNSQ |
| | ESVTEQDSKDSTYSLSSTLTLSKADYEKHKVYACEVTHQGLSSPVTKSFNRGEC |
| | (SEQ ID NO: 93) |
| 5H12 | Heavy Chain (with wild type human IgG1 constant region) |
| VH5 (C33D*)/Vκ4 | QVQLVQSGAEVKKPGASVKVSCKASGYSFTDYDINWVRQAPGQGLEWMGWIY |
| | PGSGNTRYSERFKGRVTITRDTSASTAYMELSSLRSEDTAVYYCAREDYYPYH |
| | GMDYWGQGTLVTVSSASTKGPSVFPLAPSSKSTSGGTAALGCLVKDYFPEPVTV |
| | SWNSGALTSGVHTFPAVLQSSGLYSLSSVVTVPSSSLGTQTYICNVNHKPSNTKV |
| | DKKVEPKSCDKTHTCPPCPAPELLGGPSVFLFPPKPKDTLMISRTPEVTCVVVDVS |
| | HEDPEVKFNWYVDGVEVHNAKTKPREEQYNSTYRVVSVLTVLHQDWLNGKEY |
| | KCKVSNKALPAPIEKTISKAKGQPREPQVYTLPPSRDELTKNQVSLTCLVKGFYPS |
| | DIAVEWESNGQPENNYKTTPPVLDSDGSFFLYSKLTVDKSRWQQGNVFSCSVMH |
| | EALHNHYTQKSLSLSPGK (SEQ ID NO: 94) |
| | Light Chain (with kappa light chain constant region) |
| | DIVMTQSPDSLAVSLGERATINCRASESVDGYDNSFMHWYQQKPGQPPKLLIFR |
| | ASNLESGVPDRFSGSGSGTDFTLTISSLQAEDVAVYYCQQSSEDPWTFGQGTKLE |
| | IKRTVAAPSVFIFPPSDEQLKSGTASVVCLLNNFYPREAKVQWKVDNALQSGNSQ |
| | ESVTEQDSKDSTYSLSSTLTLSKADYEKHKVYACEVTHQGLSSPVTKSFNRGEC |
| | (SEQ ID NO: 95) |
| 5H12 | Heavy Chain (with wild type human IgG1 constant region) |
| VH5 (C33Y*)/Vκ4 | QVQLVQSGAEVKKPGASVKVSCKASGYSFTDYYINWVRQAPGQGLEWMGWIY |
| | PGSGNTRYSERFKGRVTITRDTSASTAYMELSSLRSEDTAVYYCAREDYYPYH |
| | GMDYWGQGTLVTVSSASTKGPSVFPLAPSSKSTSGGTAALGCLVKDYFPEPVTV |
| | SWNSGALTSGVHTFPAVLQSSGLYSLSSVVTVPSSSLGTQTYICNVNHKPSNTKV |
| | DKKVEPKSCDKTHTCPPCPAPELLGGPSVFLFPPKPKDTLMISRTPEVTCVVVDVS |
| | HEDPEVKFNWYVDGVEVHNAKTKPREEQYNSTYRVVSVLTVLHQDWLNGKEY |
| | KCKVSNKALPAPIEKTISKAKGQPREPQVYTLPPSRDELTKNQVSLTCLVKGFYPS |
| | DIAVEWESNGQPENNYKTTPPVLDSDGSFFLYSKLTVDKSRWQQGNVFSCSVMH |
| | EALHNHYTQKSLSLSPGK (SEQ ID NO: 92) |
| | Light Chain (with kappa light chain constant region) |
| | DIVMTQSPDSLAVSLGERATINCRASESVDGYDNSFMHWYQQKPGQPPKLLIFR |
| | ASNLESGVPDRESGSGSGTDFTLTISSLQAEDVAVYYCQQSSEDPWTFGQGTKLE |
| | IKRTVAAPSVFIFPPSDEQLKSGTASVVCLLNNFYPREAKVQWKVDNALQSGNSQ |
| | ESVTEQDSKDSTYSLSSTLTLSKADYEKHKVYACEVTHQGLSSPVTKSFNRGEC |
| | (SEQ ID NO: 95) |

*mutation positions are according to Kabat numbering of the respective VH sequences containing the mutations
**CDRs according to the Kabat numbering system are bolded; VH/VL sequences underlined

[0199] In some embodiments, the humanized anti-TfR antibody of the present disclosure comprises a heavy chain containing no more than 25 amino acid variations (e.g., no more than 25, 24, 23, 22, 21, 20, 19, 18, 17, 16, 15, 14, 13, 12, 11, 10, 9, 8, 7, 6, 5, 4, 3, 2, or 1 amino acid variation) as compared with the heavy chain as set forth in any one of SEQ ID NOs: 84, 86, 87, 88, 91, 92, and 94. Alternatively or in addition (e.g., in addition), the humanized anti-TfR antibody of the present disclosure comprises a light chain containing no more than 25 amino acid variations (e.g., no more than 25, 24, 23, 22, 21, 20, 19, 18, 17, 16, 15, 14, 13, 12, 11, 10, 9, 8, 7, 6, 5, 4, 3, 2, or 1 amino acid variation) as compared with the light chain as set forth in any one of SEQ ID NOs: 85, 89, 90, 93, and 95.

[0200] In some embodiments, the humanized anti-TfR antibody described herein comprises a heavy chain comprising an amino acid sequence that is at least 75% (e.g., 75%, 80%, 85%, 90%, 95%, 98%, or 99%) identical to any one of SEQ ID NOs: 84, 86, 87, 88, 91, 92, and 94. Alternatively or in addition (e.g., in addition), the humanized anti-TfR antibody described herein comprises a light chain comprising an amino acid sequence that is at least 75% (e.g., 75%, 80%, 85%, 90%, 95%, 98%, or 99%) identical to any one of SEQ ID NOs: 85, 89, 90, 93, and 95. In some embodiments, the anti-TfR antibody described herein comprises a heavy chain comprising the amino acid sequence of any one of SEQ ID NOs: 84, 86, 87, 88, 91, 92, and 94. Alternatively or in addition (e.g., in addition), the anti-TfR antibody described herein comprises a light chain comprising the amino acid sequence of any one of SEQ ID NOs: 85, 89, 90, 93, and 95.

[0201] In some embodiments, the humanized anti-TfR antibody of the present disclosure comprises a heavy chain comprising an amino acid sequence that is at least 80% (e.g., 80%, 85%, 90%, 95%, 98%, or 99%) identical to SEQ ID NO: 84, and/or (e.g., and) a light chain comprising an amino acid sequence that is at least 80% identical (e.g., 80%, 85%, 90%, 95%, 98%, or 99%) to SEQ ID NO: 85. In some embodiments, the humanized anti-TfR antibody of the present disclosure comprises a heavy chain comprising the amino acid sequence of SEQ ID NO: 84 and a light chain comprising the amino acid sequence of SEQ ID NO: 85.

[0202] In some embodiments, the humanized anti-TfR antibody of the present disclosure comprises a heavy chain comprising an amino acid sequence that is at least 80% (e.g., 80%, 85%, 90%, 95%, 98%, or 99%) identical to SEQ ID NO: 86, and/or (e.g., and) a light chain comprising an amino acid sequence that is at least 80% identical (e.g., 80%, 85%, 90%, 95%, 98%, or 99%) to SEQ ID NO: 85. In some embodiments, the humanized anti-TfR antibody of the present disclosure comprises a heavy chain comprising the amino acid sequence of SEQ ID NO: 86 and a light chain comprising the amino acid sequence of SEQ ID NO: 85.

[0203] In some embodiments, the humanized anti-TfR antibody of the present disclosure comprises a heavy chain comprising an amino acid sequence that is at least 80% (e.g., 80%, 85%, 90%, 95%, 98%, or 99%) identical to SEQ ID NO: 87, and/or (e.g., and) a light chain comprising an amino acid sequence that is at least 80% identical (e.g., 80%, 85%, 90%, 95%, 98%, or 99%) to SEQ ID NO: 85. In some embodiments, the humanized anti-TfR antibody of the present disclosure comprises a heavy chain comprising the amino acid sequence of SEQ ID NO: 87 and a light chain comprising the amino acid sequence of SEQ ID NO: 85.

[0204] In some embodiments, the humanized anti-TfR antibody of the present disclosure comprises a heavy chain comprising an amino acid sequence that is at least 80% (e.g., 80%, 85%, 90%, 95%, 98%, or 99%) identical to SEQ ID NO: 88, and/or (e.g., and) a light chain comprising an amino acid sequence that is at least 80% identical (e.g., 80%, 85%, 90%, 95%, 98%, or 99%) to SEQ ID NO: 89. In some embodiments, the humanized anti-TfR antibody of the present disclosure comprises a heavy chain comprising the amino acid sequence of SEQ ID NO: 88 and a light chain comprising the amino acid sequence of SEQ ID NO: 89.

[0205] In some embodiments, the humanized anti-TfR antibody of the present disclosure comprises a heavy chain comprising an amino acid sequence that is at least 80% (e.g., 80%, 85%, 90%, 95%, 98%, or 99%) identical to SEQ ID NO: 88, and/or (e.g., and) a light chain comprising an amino acid sequence that is at least 80% identical (e.g., 80%, 85%, 90%, 95%, 98%, or 99%) to SEQ ID NO: 90. In some embodiments, the humanized anti-TfR antibody of the present disclosure comprises a heavy chain comprising the amino acid sequence of SEQ ID NO: 88 and a light chain comprising the amino acid sequence of SEQ ID NO: 90.

[0206] In some embodiments, the humanized anti-TfR antibody of the present disclosure comprises a heavy chain comprising an amino acid sequence that is at least 80% (e.g., 80%, 85%, 90%, 95%, 98%, or 99%) identical to SEQ ID NO: 91, and/or (e.g., and) a light chain comprising an amino acid sequence that is at least 80% identical (e.g., 80%, 85%, 90%, 95%, 98%, or 99%) to SEQ ID NO: 89. In some embodiments, the humanized anti-TfR antibody of the present disclosure comprises a heavy chain comprising the amino acid sequence of SEQ ID NO: 91 and a light chain comprising the amino acid sequence of SEQ ID NO: 89.

[0207] In some embodiments, the humanized anti-TfR antibody of the present disclosure comprises a heavy chain comprising an amino acid sequence that is at least 80% (e.g., 80%, 85%, 90%, 95%, 98%, or 99%) identical to SEQ ID NO: 91, and/or (e.g., and) a light chain comprising an amino acid sequence that is at least 80% identical (e.g., 80%, 85%, 90%, 95%, 98%, or 99%) to SEQ ID NO: 90. In some embodiments, the humanized anti-TfR antibody of the present disclosure comprises a heavy chain comprising the amino acid sequence of SEQ ID NO: 91 and a light chain comprising the amino acid sequence of SEQ ID NO: 90.

[0208] In some embodiments, the humanized anti-TfR antibody of the present disclosure comprises a heavy chain comprising an amino acid sequence that is at least 80% (e.g., 80%, 85%, 90%, 95%, 98%, or 99%) identical to SEQ ID NO: 92, and/or (e.g., and) a light chain comprising an amino acid sequence that is at least 80% identical (e.g., 80%, 85%, 90%, 95%, 98%, or 99%) to SEQ ID NO: 93. In some embodiments, the humanized anti-TfR antibody of the present disclosure comprises a heavy chain comprising the amino acid sequence of SEQ ID NO: 92 and a light chain comprising the amino acid sequence of SEQ ID NO: 93.

[0209] In some embodiments, the humanized anti-TfR antibody of the present disclosure comprises a heavy chain comprising an amino acid sequence that is at least 80% (e.g., 80%, 85%, 90%, 95%, 98%, or 99%) identical to SEQ ID NO: 94, and/or (e.g., and) a light chain comprising an amino acid sequence that is at least 80% identical (e.g., 80%, 85%, 90%, 95%, 98%, or 99%) to SEQ ID NO: 95. In some embodiments, the humanized anti-TfR antibody of the present disclosure comprises a heavy chain comprising the amino acid sequence of SEQ ID NO: 94 and a light chain comprising the amino acid sequence of SEQ ID NO: 95.

[0210] In some embodiments, the humanized anti-TfR antibody of the present disclosure comprises a heavy chain comprising an amino acid sequence that is at least 80% (e.g., 80%, 85%, 90%, 95%, 98%, or 99%) identical to SEQ ID NO: 92, and/or (e.g., and) a light chain comprising an amino acid sequence that is at least 80% identical (e.g., 80%, 85%, 90%, 95%, 98%, or 99%) to SEQ ID NO: 95. In some embodiments, the humanized anti-TfR antibody of the present disclosure comprises a heavy chain comprising the amino acid sequence of SEQ ID NO: 92 and a light chain comprising the amino acid sequence of SEQ ID NO: 95.

[0211] In some embodiments, the anti-TfR antibody is a Fab fragment, Fab′ fragment, or F(ab′)₂ fragment of an intact antibody (full-length antibody). Antigen binding fragment of an intact antibody (full-length antibody) can be prepared via routine methods (e.g., recombinantly or by digesting the heavy chain constant region of a full length IgG using an enzyme such as papain). For example, F(ab′)₂ fragments can be produced by pepsin or papain digestion of an antibody molecule, and Fab′ fragments that can be generated by reducing the disulfide bridges of F(ab′)₂ fragments. In some embodiments, a heavy chain constant region in a Fab fragment of the anti-TfR1 antibody described herein comprises the amino acid sequence of:

(SEQ ID NO: 96)
ASTKGPSVFPLAPSSKSTSGGTAALGCLVKDYFPEPVTVSWNSGALTSG
VHTFPAVLQSSGLYSLSSVVTVPSSSLGTQTYICNVNHKPSNTKVDKKV
EPKSCDKTHT

[0212] In some embodiments, the humanized anti-TfR antibody described herein comprises a heavy chain comprising any one of the VH as listed in Table 3 or any variants thereof and a heavy chain constant region that is at least 80%, at least 85%, at least 90%, at least 95%, or at least 99% identical to SEQ ID NO: 96. In some embodiments, the humanized anti-TfR antibody described herein comprises a heavy chain comprising any one of the VH as listed in Table 3 or any variants thereof and a heavy chain constant region that contains no more than 25 amino acid variations (e.g., no more than 25, 24, 23, 22, 21, 20, 19, 18, 17, 16, 15, 14, 13, 12, 11, 10, 9, 8, 7, 6, 5, 4, 3, 2, or 1 amino acid variation) as compared with SEQ ID NO: 96. In some embodiments, the humanized anti-TfR antibody described herein comprises a heavy chain comprising any one of the VH as listed in Table 3 or any variants thereof and a heavy chain constant region as set forth in SEQ ID NO: 96.

[0213] In some embodiments, the humanized anti-TfR antibody described herein comprises a light chain comprising any one of the VL as listed in Table 3 or any variants thereof and a light chain constant region that is at least 80%, at least 85%, at least 90%, at least 95%, or at least 99% identical to SEQ ID NO: 83. In some embodiments, the humanized anti-TfR antibody described herein comprises a light chain comprising any one of the VL as listed in Table 3 or any variants thereof and a light chain constant region contains no more than 25 amino acid variations (e.g., no more than 25, 24, 23, 22, 21, 20, 19, 18, 17, 16, 15, 14, 13, 12, 11, 10, 9, 8, 7, 6, 5, 4, 3, 2, or 1 amino acid variation) as compared with SEQ ID NO: 83. In some embodiments, the humanized anti-TfR antibody described herein comprises a light chain comprising any one of the VL as listed in Table 3 or any variants thereof and a light chain constant region set forth in SEQ ID NO: 83.

[0214] Examples of Fab heavy chain and light chain amino acid sequences of the anti-TfR antibodies described are provided in Table 5 below.

TABLE 5
Heavy chain and light chain sequences of examples of humanized anti-
TfR Fabs

| Antibody | Fab Heavy Chain/Light Chain Sequences** |
|---|---|
| 3A4 | Heavy Chain (with partial human IgG1 constant region) |
| VH3 (N54T*)/Vκ4 | EVQLVQSGSELKKPGASVKVSCTASGFNIKDDYMYWVRQPPGKGLEWIGWIDP |
| | ETGDTEYASKFQDRVTVTADTSTNTAYMELSSLRSEDTAVYYCTLWLRRGLD |
| | YWGQGTLVTVSSASTKGPSVFPLAPSSKSTSGGTAALGCLVKDYFPEPVTVSWNS |
| | GALTSGVHTFPAVLQSSGLYSLSSVVTVPSSSLGTQTYICNVNHKPSNTKVDKKV |
| | EPKSCDKTHT (SEQ ID NO: 97) |
| | Light Chain (with kappa light chain constant region) |
| | DIVMTQSPLSLPVTPGEPASISCRSSKSLLHSNGYTYLFWFQQRPGQSPRLLIYRM |
| | SNLASGVPDRFSGSGSGTDFTLKISRVEAEDVGVYYCMQHLEYPFTFGGGTKVE |
| | IKRTVAAPSVFIFPPSDEQLKSGTASVVCLLNNFYPREAKVQWKVDNALQSGNSQ |
| | ESVTEQDSKDSTYSLSSTLTLSKADYEKHKVYACEVTHQGLSSPVTKSFNRGEC |
| | (SEQ ID NO: 85) |
| 3A4 | Heavy Chain (with partial human IgG1 constant region) |
| VH3 (N54S*)/Vκ4 | EVQLVQSGSELKKPGASVKVSCTASGFNIKDDYMYWVRQPPGKGLEWIGWIDP |
| | ESGDTEYASKFQDRVTVTADTSTNTAYMELSSLRSEDTAVYYCTLWLRRGLDY |
| | WGQGTLVTVSSASTKGPSVFPLAPSSKSTSGGTAALGCLVKDYFPEPVTVSWNSG |
| | ALTSGVHTFPAVLQSSGLYSLSSVVTVPSSSLGTQTYICNVNHKPSNTKVDKKVE |
| | PKSCDKTHT (SEQ ID NO: 98) |
| | Light Chain (with kappa light chain constant region) |
| | DIVMTQSPLSLPVTPGEPASISCRSSKSLLHSNGYTYLFWFQQRPGQSPRLLIYRM |
| | SNLASGVPDRFSGSGSGTDFTLKISRVEAEDVGVYYCMQHLEYPFTFGGGTKVE |
| | IKRTVAAPSVFIFPPSDEQLKSGTASVVCLLNNFYPREAKVQWKVDNALQSGNSQ |
| | ESVTEQDSKDSTYSLSSTLTLSKADYEKHKVYACEVTHQGLSSPVTKSFNRGEC |
| | (SEQ ID NO: 85) |
| 3A4 | Heavy Chain (with partial human IgG1 constant region) |
| VH3/Vκ4 | EVQLVQSGSELKKPGASVKVSCTASGFNIKDDYMYWVRQPPGKGLEWIGWIDP |
| | ENGDTEYASKFQDRVTVTADTSTNTAYMELSSLRSEDTAVYYCTLWLRRGLD |
| | YWGQGTLVTVSSASTKGPSVFPLAPSSKSTSGGTAALGCLVKDYFPEPVTVSWNS |
| | GALTSGVHTFPAVLQSSGLYSLSSVVTVPSSSLGTQTYICNVNHKPSNTKVDKKV |
| | EPKSCDKTHT (SEQ ID NO: 99) |
| | Light Chain (with kappa light chain constant region) |
| | DIVMTQSPLSLPVTPGEPASISCRSSKSLLHSNGYTYLFWFQQRPGQSPRLLIYRM |
| | SNLASGVPDRFSGSGSGTDFTLKISRVEAEDVGVYYCMQHLEYPFTFGGGTKVE |
| | IKRTVAAPSVFIFPPSDEQLKSGTASVVCLLNNFYPREAKVQWKVDNALQSGNSQ |
| | ESVTEQDSKDSTYSLSSTLTLSKADYEKHKVYACEVTHQGLSSPVTKSFNRGEC |
| | (SEQ ID NO: 85) |
| 3M12 | Heavy Chain (with partial human IgG1 constant region) |
| VH3/Vκ2 | QVQLQESGPGLVKPSQTLSLTCSVTGYSITSGYYWNWIRQPPGKGLEWMGYITF |
| | DGANNYNPSLKNRVSISRDTSKNQFSLKLSSVTAEDTATYYCTRSSYDYDVLDY |
| | WGQGTTVTVSSASTKGPSVFPLAPSSKSTSGGTAALGCLVKDYFPEPVTVSWNSG |
| | ALTSGVHTFPAVLQSSGLYSLSSVVTVPSSSLGTQTYICNVNHKPSNTKVDKKVE |
| | PKSCDKTHT (SEQ ID NO: 100) |
| | Light Chain (with kappa light chain constant region) |
| | DIQMTQSPSSLSASVGDRVTITCRASQDISNFLNWYQQKPGQPVKLLIYYTSRLH |
| | SGVPSRFSGSGSGTDFTLTISSLQPEDFATYFCQQGHTLPYTFGQGTKLEIKRTVA |
| | APSVFIFPPSDEQLKSGTASVVCLLNNFYPREAKVQWKVDNALQSGNSQESVTEQ |
| | DSKDSTYSLSSTLTLSKADYEKHKVYACEVTHQGLSSPVTKSFNRGEC (SEQ ID |
| | NO: 89) |
| 3M12 | Heavy Chain (with partial human IgG1 constant region) |
| VH3/Vκ3 | QVQLQESGPGLVKPSQTLSLTCSVTGYSITSGYYWNWIRQPPGKGLEWMGYITF |
| | DGANNYNPSLKNRVSISRDTSKNQFSLKLSSVTAEDTATYYCTRSSYDYDVLDY |
| | WGQGTTVTVSSASTKGPSVFPLAPSSKSTSGGTAALGCLVKDYFPEPVTVSWNSG |
| | ALTSGVHTFPAVLQSSGLYSLSSVVTVPSSSLGTQTYICNVNHKPSNTKVDKKVE |
| | PKSCDKTHT (SEQ ID NO: 100) |
| | Light Chain (with kappa light chain constant region) |
| | DIQMTQSPSSLSASVGDRVTITCRASQDISNFLNWYQQKPGQPVKLLIYYTSRLH |
| | SGVPSRFSGSGSGTDFTLTISSLQPEDFATYYCQQGHTLPYTFGQGTKLEIKRTVA |
| | APSVFIFPPSDEQLKSGTASVVCLLNNFYPREAKVQWKVDNALQSGNSQESVTEQ |
| | DSKDSTYSLSSTLTLSKADYEKHKVYACEVTHQGLSSPVTKSFNRGEC (SEQ ID |
| | NO: 90) |
| 3M12 | Heavy Chain (with partial human IgG1 constant region) |
| VH4/Vκ2 | QVQLQESGPGLVKPSQTLSLTCTVTGYSITSGYYWNWIRQPPGKGLEWIGYITFD |
| | GANNYNPSLKNRVSISRDTSKNQFSLKLSSVTAEDTATYYCTRSSYDYDVLDYW |
| | GQGTTVTVSSASTKGPSVFPLAPSSKSTSGGTAALGCLVKDYFPEPVTVSWNSGA |
| | LTSGVHTFPAVLQSSGLYSLSSVVTVPSSSLGTQTYICNVNHKPSNTKVDKKVEP |
| | KSCDKTHT (SEQ ID NO: 101) |
| | Light Chain (with kappa light chain constant region) |
| | DIQMTQSPSSLSASVGDRVTITCRASQDISNFLNWYQQKPGQPVKLLIYYTSRLH |
| | SGVPSRFSGSGSGTDFTLTISSLQPEDFATYFCQQGHTLPYTFGQGTKLEIKRTVA |
| | APSVFIFPPSDEQLKSGTASVVCLLNNFYPREAKVQWKVDNALQSGNSQESVTEQ |
| | DSKDSTYSLSSTLTLSKADYEKHKVYACEVTHQGLSSPVTKSFNRGEC (SEQ ID |
| | NO: 89) |
| 3M12 | Heavy Chain (with partial human IgG1 constant region) |
| VH4/Vκ3 | QVQLQESGPGLVKPSQTLSLTCTVTGYSITSGYYWNWIRQPPGKGLEWIGYITFD |
| | GANNYNPSLKNRVSISRDTSKNQFSLKLSSVTAEDTATYYCTRSSYDYDVLDYW |
| | GQGTTVTVSSASTKGPSVFPLAPSSKSTSGGTAALGCLVKDYFPEPVTVSWNSGA |
| | LTSGVHTFPAVLQSSGLYSLSSVVTVPSSSLGTQTYICNVNHKPSNTKVDKKVEP |
| | KSCDKTHT (SEQ ID NO: 101) |
| | Light Chain (with kappa light chain constant region) |
| | DIQMTQSPSSLSASVGDRVTITCRASQDISNFLNWYQQKPGQPVKLLIYYTSRLH |
| | SGVPSRFSGSGSGTDFTLTISSLQPEDFATYYCQQGHTLPYTFGQGTKLEIKRTVA |
| | APSVFIFPPSDEQLKSGTASVVCLLNNFYPREAKVQWKVDNALQSGNSQESVTEQ |
| | DSKDSTYSLSSTLTLSKADYEKHKVYACEVTHQGLSSPVTKSFNRGEC (SEQ ID |
| | NO: 90) |
| 5H12 | Heavy Chain (with partial human IgG1 constant region) |
| VH5(C33Y*)/Vκ3 | QVQLVQSGAEVKKPGASVKVSCKASGYSFTDYYINWVRQAPGQGLEWMGWIY |
| | PGSGNTRYSERFKGRVTITRDTSASTAYMELSSLRSEDTAVYYCAREDYYPYH |
| | GMDYWGQGTLVTVSSASTKGPSVFPLAPSSKSTSGGTAALGCLVKDYFPEPVTV |
| | SWNSGALTSGVHTFPAVLQSSGLYSLSSVVTVPSSSLGTQTYICNVNHKPSNTKV |
| | DKKVEPKSCDKTHT (SEQ ID NO: 102) |
| | Light Chain (with kappa light chain constant region) |
| | DIVLTQSPDSLAVSLGERATINCRASESVDGYDNSFMHWYQQKPGQPPKLLIFRA |
| | SNLESGVPDRFSGSGSRTDFTLTISSLQAEDVAVYYCQQSSEDPWTFGQGTKLEI |
| | KRTVAAPSVFIFPPSDEQLKSGTASVVCLLNNFYPREAKVQWKVDNALQSGNSQ |
| | ESVTEQDSKDSTYSLSSTLTLSKADYEKHKVYACEVTHQGLSSPVTKSFNRGEC |
| | (SEQ ID NO: 93) |
| 5H12 | Heavy Chain (with partial human IgG1 constant region) |
| VH5 (C33D*)/Vκ4 | QVQLVQSGAEVKKPGASVKVSCKASGYSFTDYDINWVRQAPGOGLEWMGWIY |
| | PGSGNTRYSERFKGRVTITRDTSASTAYMELSSLRSEDTAVYYCAREDYYPYH |
| | GMDYWGQGTLVTVSSASTKGPSVFPLAPSSKSTSGGTAALGCLVKDYFPEPVTV |
| | SWNSGALTSGVHTFPAVLQSSGLYSLSSVVTVPSSSLGTQTYICNVNHKPSNTKV |
| | DKKVEPKSCDKTHT (SEQ ID NO: 103) |
| | Light Chain (with kappa light chain constant region) |
| | DIVMTQSPDSLAVSLGERATINCRASESVDGYDNSFMHWYQQKPGQPPKLLIFR |
| | ASNLESGVPDRESGSGSGTDFTLTISSLQAEDVAVYYCQQSSEDPWTFGQGTKLE |
| | IKRTVAAPSVFIFPPSDEQLKSGTASVVCLLNNFYPREAKVQWKVDNALQSGNSQ |
| | ESVTEQDSKDSTYSLSSTLTLSKADYEKHKVYACEVTHQGLSSPVTKSFNRGEC |
| | (SEQ ID NO: 95) |
| 5H12 | Heavy Chain (with partial human IgG1 constant region) |
| VH5(C33Y*)/Vκ4 | QVQLVQSGAEVKKPGASVKVSCKASGYSFTDYYINWVRQAPGQGLEWMGWIY |
| | PGSGNTRYSERFKGRVTITRDTSASTAYMELSSLRSEDTAVYYCAREDYYPYH |
| | GMDYWGQGTLVTVSSASTKGPSVFPLAPSSKSTSGGTAALGCLVKDYFPEPVTV |
| | SWNSGALTSGVHTFPAVLQSSGLYSLSSVVTVPSSSLGTQTYICNVNHKPSNTKV |
| | DKKVEPKSCDKTHT (SEQ ID NO: 102) |
| | Light Chain (with kappa light chain constant region) |
| | DIVMTQSPDSLAVSLGERATINCRASESVDGYDNSFMHWYQQKPGQPPKLLIFR |
| | ASNLESGVPDRESGSGSGTDFTLTISSLQAEDVAVYYCQQSSEDPWTFGQGTKLE |
| | IKRTVAAPSVFIFPPSDEQLKSGTASVVCLLNNFYPREAKVQWKVDNALQSGNSQ |
| | ESVTEQDSKDSTYSLSSTLTLSKADYEKHKVYACEVTHQGLSSPVTKSFNRGEC |
| | (SEQ ID NO: 95) |

*mutation positions are according to Kabat numbering of the respective VH sequences containing the mutations
**CDRs according to the Kabat numbering system are bolded; VH/VL sequences underlined

[0215] In some embodiments, the humanized anti-TfR antibody of the present disclosure comprises a heavy chain containing no more than 25 amino acid variations (e.g., no more than 25, 24, 23, 22, 21, 20, 19, 18, 17, 16, 15, 14, 13, 12, 11, 10, 9, 8, 7, 6, 5, 4, 3, 2, or 1 amino acid variation) as compared with the heavy chain as set forth in any one of SEQ ID NOs: 97-103. Alternatively or in addition (e.g., in addition), the humanized anti-TfR antibody of the present disclosure comprises a light chain containing no more than 25 amino acid variations (e.g., no more than 25, 24, 23, 22, 21, 20, 19, 18, 17, 16, 15, 14, 13, 12, 11, 10, 9, 8, 7, 6, 5, 4, 3, 2, or 1 amino acid variation) as compared with the light chain as set forth in any one of SEQ ID NOs: 85, 89, 90, 93, and 95.

[0216] In some embodiments, the humanized anti-TfR antibody described herein comprises a heavy chain comprising an amino acid sequence that is at least 75% (e.g., 75%, 80%, 85%, 90%, 95%, 98%, or 99%) identical to any one of SEQ ID NOs: 97-103. Alternatively or in addition (e.g., in addition), the humanized anti-TfR antibody described herein comprises a light chain comprising an amino acid sequence that is at least 75% (e.g., 75%, 80%, 85%, 90%, 95%, 98%, or 99%) identical to any one of SEQ ID NOs: 85, 89, 90, 93, and 95. In some embodiments, the anti-TfR antibody described herein comprises a heavy chain comprising the amino acid sequence of any one of SEQ ID NOs: 97-103. Alternatively or in addition (e.g., in addition), the anti-TfR antibody described herein comprises a light chain comprising the amino acid sequence of any one of SEQ ID NOs: 85, 89, 90, 93, and 95.

[0217] In some embodiments, the humanized anti-TfR antibody of the present disclosure comprises a heavy chain comprising an amino acid sequence that is at least 80% (e.g., 80%, 85%, 90%, 95%, 98%, or 99%) identical to SEQ ID NO: 97, and/or (e.g., and) a light chain comprising an amino acid sequence that is at least 80% identical (e.g., 80%, 85%, 90%, 95%, 98%, or 99%) to SEQ ID NO: 85. In some embodiments, the humanized anti-TfR antibody of the present disclosure comprises a heavy chain comprising the amino acid sequence of SEQ ID NO: 97 and a light chain comprising the amino acid sequence of SEQ ID NO: 85.

[0218] In some embodiments, the humanized anti-TfR antibody of the present disclosure comprises a heavy chain comprising an amino acid sequence that is at least 80% (e.g., 80%, 85%, 90%, 95%, 98%, or 99%) identical to SEQ ID NO: 98, and/or (e.g., and) a light chain comprising an amino acid sequence that is at least 80% identical (e.g., 80%, 85%, 90%, 95%, 98%, or 99%) to SEQ ID NO: 85. In some embodiments, the humanized anti-TfR antibody of the present disclosure comprises a heavy chain comprising the amino acid sequence of SEQ ID NO: 98 and a light chain comprising the amino acid sequence of SEQ ID NO: 85.

[0219] In some embodiments, the humanized anti-TfR antibody of the present disclosure comprises a heavy chain comprising an amino acid sequence that is at least 80% (e.g., 80%, 85%, 90%, 95%, 98%, or 99%) identical to SEQ ID NO: 99, and/or (e.g., and) a light chain comprising an amino acid sequence that is at least 80% identical (e.g., 80%, 85%, 90%, 95%, 98%, or 99%) to SEQ ID NO: 85. In some embodiments, the humanized anti-TfR antibody of the present disclosure comprises a heavy chain comprising the amino acid sequence of SEQ ID NO: 99 and a light chain comprising the amino acid sequence of SEQ ID NO: 85.

[0220] In some embodiments, the humanized anti-TfR antibody of the present disclosure comprises a heavy chain comprising an amino acid sequence that is at least 80% (e.g., 80%, 85%, 90%, 95%, 98%, or 99%) identical to SEQ ID NO: 100, and/or (e.g., and) a light chain comprising an amino acid sequence that is at least 80% identical (e.g., 80%, 85%, 90%, 95%, 98%, or 99%) to SEQ ID NO: 89. In some embodiments, the humanized anti-TfR antibody of the present disclosure comprises a heavy chain comprising the amino acid sequence of SEQ ID NO: 100 and a light chain comprising the amino acid sequence of SEQ ID NO: 89.

[0221] In some embodiments, the humanized anti-TfR antibody of the present disclosure comprises a heavy chain comprising an amino acid sequence that is at least 80% (e.g., 80%, 85%, 90%, 95%, 98%, or 99%) identical to SEQ ID NO: 100, and/or (e.g., and) a light chain comprising an amino acid sequence that is at least 80% identical (e.g., 80%, 85%, 90%, 95%, 98%, or 99%) to SEQ ID NO: 90. In some embodiments, the humanized anti-TfR antibody of the present disclosure comprises a heavy chain comprising the amino acid sequence of SEQ ID NO: 100 and a light chain comprising the amino acid sequence of SEQ ID NO: 90.

[0222] In some embodiments, the humanized anti-TfR antibody of the present disclosure comprises a heavy chain comprising an amino acid sequence that is at least 80% (e.g., 80%, 85%, 90%, 95%, 98%, or 99%) identical to SEQ ID NO: 101, and/or (e.g., and) a light chain comprising an amino acid sequence that is at least 80% identical (e.g., 80%, 85%, 90%, 95%, 98%, or 99%) to SEQ ID NO: 89. In some embodiments, the humanized anti-TfR antibody of the present disclosure comprises a heavy chain comprising the amino acid sequence of SEQ ID NO: 101 and a light chain comprising the amino acid sequence of SEQ ID NO: 89.

[0223] In some embodiments, the humanized anti-TfR antibody of the present disclosure comprises a heavy chain comprising an amino acid sequence that is at least 80% (e.g., 80%, 85%, 90%, 95%, 98%, or 99%) identical to SEQ ID NO: 101, and/or (e.g., and) a light chain comprising an amino acid sequence that is at least 80% identical (e.g., 80%, 85%, 90%, 95%, 98%, or 99%) to SEQ ID NO: 90. In some embodiments, the humanized anti-TfR antibody of the present disclosure comprises a heavy chain comprising the amino acid sequence of SEQ ID NO: 101 and a light chain comprising the amino acid sequence of SEQ ID NO: 90.

[0224] In some embodiments, the humanized anti-TfR antibody of the present disclosure comprises a heavy chain comprising an amino acid sequence that is at least 80% (e.g., 80%, 85%, 90%, 95%, 98%, or 99%) identical to SEQ ID NO: 102, and/or (e.g., and) a light chain comprising an amino acid sequence that is at least 80% identical (e.g., 80%, 85%, 90%, 95%, 98%, or 99%) to SEQ ID NO: 93. In some embodiments, the humanized anti-TfR antibody of the present disclosure comprises a heavy chain comprising the amino acid sequence of SEQ ID NO: 102 and a light chain comprising the amino acid sequence of SEQ ID NO: 93.

[0225] In some embodiments, the humanized anti-TfR antibody of the present disclosure comprises a heavy chain comprising an amino acid sequence that is at least 80% (e.g., 80%, 85%, 90%, 95%, 98%, or 99%) identical to SEQ ID NO: 103, and/or (e.g., and) a light chain comprising an amino acid sequence that is at least 80% identical (e.g., 80%, 85%, 90%, 95%, 98%, or 99%) to SEQ ID NO: 95. In some embodiments, the humanized anti-TfR antibody of the present disclosure comprises a heavy chain comprising the amino acid sequence of SEQ ID NO: 103 and a light chain comprising the amino acid sequence of SEQ ID NO: 95.

[0226] In some embodiments, the humanized anti-TfR antibody of the present disclosure comprises a heavy chain comprising an amino acid sequence that is at least 80% (e.g., 80%, 85%, 90%, 95%, 98%, or 99%) identical to SEQ ID NO: 102, and/or (e.g., and) a light chain comprising an amino acid sequence that is at least 80% identical (e.g., 80%, 85%, 90%, 95%, 98%, or 99%) to SEQ ID NO: 95. In some embodiments, the humanized anti-TfR antibody of the present disclosure comprises a heavy chain comprising the amino acid sequence of SEQ ID NO: 102 and a light chain comprising the amino acid sequence of SEQ ID NO: 95.

[0227] In some embodiments, the humanized anti-TfR receptor antibodies described herein can be in any antibody form, including, but not limited to, intact (i.e., full-length) antibodies, antigen-binding fragments thereof (such as Fab, Fab′, F(ab′)₂, Fv), single chain antibodies, bi-specific antibodies, or nanobodies. In some embodiments, humanized the anti-TfR antibody described herein is a scFv. In some embodiments, the humanized anti-TfR antibody described herein is a scFv-Fab (e.g., scFv fused to a portion of a constant region). In some embodiments, the anti-TfR receptor antibody described herein is a scFv fused to a constant region (e.g., human IgG1 constant region as set forth in SEQ ID NO: 81 or SEQ ID NO: 82, or a portion thereof such as the Fc portion) at either the N-terminus of C-terminus.

[0228] In some embodiments, conservative mutations can be introduced into antibody sequences (e.g., CDRs or framework sequences) at positions where the residues are not likely to be involved in interacting with a target antigen (e.g., transferrin receptor), for example, as determined based on a crystal structure. In some embodiments, one, two or more mutations (e.g., amino acid substitutions) are introduced into the Fc region of an anti-TfR antibody described herein (e.g., in a CH2 domain (residues 231-340 of human IgG1) and/or (e.g., and) CH3 domain (residues 341-447 of human IgG1) and/or (e.g., and) the hinge region, with numbering according to the Kabat numbering system (e.g., the EU index in Kabat)) to alter one or more functional properties of the antibody, such as serum half-life, complement fixation, Fc receptor binding and/or (e.g., and) antigen-dependent cellular cytotoxicity.

[0229] In some embodiments, one, two or more mutations (e.g., amino acid substitutions) are introduced into the hinge region of the Fc region (CH1 domain) such that the number of cysteine residues in the hinge region are altered (e.g., increased or decreased) as described in, e.g., U.S. Pat. No. 5,677,425. The number of cysteine residues in the hinge region of the CH1 domain can be altered to, e.g., facilitate assembly of the light and heavy chains, or to alter (e.g., increase or decrease) the stability of the antibody or to facilitate linker conjugation.

[0230] In some embodiments, one, two or more mutations (e.g., amino acid substitutions) are introduced into the Fc region of a muscle-targeting antibody described herein (e.g., in a CH2 domain (residues 231-340 of human IgG1) and/or (e.g., and) CH3 domain (residues 341-447 of human IgG1) and/or (e.g., and) the hinge region, with numbering according to the Kabat numbering system (e.g., the EU index in Kabat)) to increase or decrease the affinity of the antibody for an Fc receptor (e.g., an activated Fc receptor) on the surface of an effector cell. Mutations in the Fc region of an antibody that decrease or increase the affinity of an antibody for an Fc receptor and techniques for introducing such mutations into the Fc receptor or fragment thereof are known to one of skill in the art. Examples of mutations in the Fc receptor of an antibody that can be made to alter the affinity of the antibody for an Fc receptor are described in, e.g., Smith P et al., (2012) PNAS 109: 6181-6186, U.S. Pat. No. 6,737,056, and International Publication Nos. WO 02/060919; WO 98/23289; and WO 97/34631, which are incorporated herein by reference.

[0231] In some embodiments, one, two or more amino acid mutations (i.e., substitutions, insertions or deletions) are introduced into an IgG constant domain, or FcRn-binding fragment thereof (preferably an Fc or hinge-Fc domain fragment) to alter (e.g., decrease or increase) half-life of the antibody in vivo. See, e.g., International Publication Nos. WO 02/060919; WO 98/23289; and WO 97/34631; and U.S. Pat. Nos. 5,869,046, 6,121,022, 6,277,375 and 6,165,745 for examples of mutations that will alter (e.g., decrease or increase) the half-life of an antibody in vivo.

[0232] In some embodiments, one, two or more amino acid mutations (i.e., substitutions, insertions or deletions) are introduced into an IgG constant domain, or FcRn-binding fragment thereof (preferably an Fc or hinge-Fc domain fragment) to decrease the half-life of the anti-anti-TfR antibody in vivo. In some embodiments, one, two or more amino acid mutations (i.e., substitutions, insertions or deletions) are introduced into an IgG constant domain, or FcRn-binding fragment thereof (preferably an Fc or hinge-Fc domain fragment) to increase the half-life of the antibody in vivo. In some embodiments, the antibodies can have one or more amino acid mutations (e.g., substitutions) in the second constant (CH2) domain (residues 231-340 of human IgG1) and/or (e.g., and) the third constant (CH3) domain (residues 341-447 of human IgG1), with numbering according to the EU index in Kabat (Kabat E A et al., (1991) supra). In some embodiments, the constant region of the IgG1 of an antibody described herein comprises a methionine (M) to tyrosine (Y) substitution in position 252, a serine (S) to threonine (T) substitution in position 254, and a threonine (T) to glutamic acid (E) substitution in position 256, numbered according to the EU index as in Kabat. See U.S. Pat. No. 7,658,921, which is incorporated herein by reference. This type of mutant IgG, referred to as “YTE mutant” has been shown to display fourfold increased half-life as compared to wild-type versions of the same antibody (see Dall'Acqua W F et al., (2006) J Biol Chem 281: 23514-24). In some embodiments, an antibody comprises an IgG constant domain comprising one, two, three or more amino acid substitutions of amino acid residues at positions 251-257, 285-290, 308-314, 385-389, and 428-436, numbered according to the EU index as in Kabat.

[0233] In some embodiments, one, two or more amino acid substitutions are introduced into an IgG constant domain Fc region to alter the effector function(s) of the anti-anti-TfR antibody. The effector ligand to which affinity is altered can be, for example, an Fc receptor or the C1 component of complement. This approach is described in further detail in U.S. Pat. Nos. 5,624,821 and 5,648,260. In some embodiments, the deletion or inactivation (through point mutations or other means) of a constant region domain can reduce Fc receptor binding of the circulating antibody thereby increasing tumor localization. See, e.g., U.S. Pat. Nos. 5,585,097 and 8,591,886 for a description of mutations that delete or inactivate the constant domain and thereby increase tumor localization. In some embodiments, one or more amino acid substitutions may be introduced into the Fc region of an antibody described herein to remove potential glycosylation sites on Fc region, which may reduce Fc receptor binding (see, e.g., Shields R L et al., (2001) J Biol Chem 276: 6591-604).

[0234] In some embodiments, one or more amino in the constant region of an anti-TfR antibody described herein can be replaced with a different amino acid residue such that the antibody has altered Clq binding and/or (e.g., and) reduced or abolished complement dependent cytotoxicity (CDC). This approach is described in further detail in U.S. Pat. No. 6,194,551 (Idusogie et al). In some embodiments, one or more amino acid residues in the N-terminal region of the CH2 domain of an antibody described herein are altered to thereby alter the ability of the antibody to fix complement. This approach is described further in International Publication No. WO 94/29351. In some embodiments, the Fc region of an antibody described herein is modified to increase the ability of the antibody to mediate antibody dependent cellular cytotoxicity (ADCC) and/or (e.g., and) to increase the affinity of the antibody for an Fcγ receptor. This approach is described further in International Publication No. WO 00/42072.

[0235] In some embodiments, the heavy and/or (e.g., and) light chain variable domain(s) sequence(s) of the antibodies provided herein can be used to generate, for example, CDR-grafted, chimeric, humanized, or composite human antibodies or antigen-binding fragments, as described elsewhere herein. As understood by one of ordinary skill in the art, any variant, CDR-grafted, chimeric, humanized, or composite antibodies derived from any of the antibodies provided herein may be useful in the compositions and methods described herein and will maintain the ability to specifically bind transferrin receptor, such that the variant, CDR-grafted, chimeric, humanized, or composite antibody has at least 50%, at least 60%, at least 70%, at least 80%, at least 90%, at least 95% or more binding to transferrin receptor relative to the original antibody from which it is derived.

[0236] In some embodiments, the antibodies provided herein comprise mutations that confer desirable properties to the antibodies. For example, to avoid potential complications due to Fab-arm exchange, which is known to occur with native IgG4 mAbs, the antibodies provided herein may comprise a stabilizing ‘Adair’ mutation (Angal S., et al., “A single amino acid substitution abolishes the heterogeneity of chimeric mouse/human (IgG4) antibody,” Mol Immunol 30, 105-108; 1993), where serine 228 (EU numbering; residue 241 Kabat numbering) is converted to proline resulting in an IgG1-like hinge sequence. Accordingly, any of the antibodies may include a stabilizing ‘Adair’ mutation.

[0237] In some embodiments, an antibody is modified, e.g., modified via glycosylation, phosphorylation, sumoylation, and/or (e.g., and) methylation. In some embodiments, an antibody is a glycosylated antibody, which is conjugated to one or more sugar or carbohydrate molecules. In some embodiments, the one or more sugar or carbohydrate molecule are conjugated to the antibody via N-glycosylation, O-glycosylation, C-glycosylation, glypiation (GPI anchor attachment), and/or (e.g., and) phosphoglycosylation. In some embodiments, the one or more sugar or carbohydrate molecules are monosaccharides, disaccharides, oligosaccharides, or glycans. In some embodiments, the one or more sugar or carbohydrate molecule is a branched oligosaccharide or a branched glycan. In some embodiments, the one or more sugar or carbohydrate molecule includes a mannose unit, a glucose unit, an N-acetylglucosamine unit, an N-acetylgalactosamine unit, a galactose unit, a fucose unit, or a phospholipid unit. In some embodiments, there are about 1-10, about 1-5, about 5-10, about 1-4, about 1-3, or about 2 sugar molecules. In some embodiments, a glycosylated antibody is fully or partially glycosylated. In some embodiments, an antibody is glycosylated by chemical reactions or by enzymatic means. In some embodiments, an antibody is glycosylated in vitro or inside a cell, which may optionally be deficient in an enzyme in the N- or O- glycosylation pathway, e.g. a glycosyltransferase. In some embodiments, an antibody is functionalized with sugar or carbohydrate molecules as described in International Patent Application Publication WO2014065661, published on May 1, 2014, entitled, “Modified antibody, antibody-conjugate and process for the preparation thereof”.

[0238] In some embodiments, any one of the anti-TfR1 antibodies described herein may comprise a signal peptide in the heavy and/or (e.g., and) light chain sequence (e.g., a N-terminal signal peptide). In some embodiments, the anti-TfR1 antibody described herein comprises any one of the VH and VL sequences, any one of the IgG heavy chain and light chain sequences, or any one of the Fab heavy chain and light chain sequences described herein, and further comprises a signal peptide (e.g., a N-terminal signal peptide). In some embodiments, the signal peptide comprises the amino acid sequence of MGWSCIILFLVATATGVHS (SEQ ID NO: 104).

[0239] Other Known Anti-Transferrin Receptor Antibodies

[0240] Any other appropriate anti-transferrin receptor antibodies known in the art may be used as the muscle-targeting agent in the complexes disclosed herein. Examples of known anti-transferrin receptor antibodies, including associated references and binding epitopes, are listed in Table 8. In some embodiments, the anti-transferrin receptor antibody comprises the complementarity determining regions (CDR-H1, CDR-H2, CDR-H3, CDR-L1, CDR-L2, and CDR-L3) of any of the anti-transferrin receptor antibodies provided herein, e.g., anti-transferrin receptor antibodies listed in Table 8.

TABLE 8
List of anti-transferrin receptor antibody clones, including
associated references and binding epitope information.

| Antibody | | |
|---|---|---|
| Clone Name | Reference(s) | Epitope/Notes |
| OKT9 | U.S. Pat. No. 4,364,934, filed Dec. 4, 1979, | Apical domain of TfR |
| | entitled “MONOCLONAL ANTIBODY | (residues 305-366 of |
| | TO A HUMAN EARLY THYMOCYTE | human TfR sequence |
| | ANTIGEN AND METHODS FOR | XM_052730.3, |
| | PREPARING SAME” | available in GenBank) |
| | Schneider C. et al. “Structural features of | |
| | the cell surface receptor for transferrin that | |
| | is recognized by the monoclonal antibody | |
| | OKT9.” J Biol Chem. 1982, 257: 14, 8516- | |
| | 8522. | |
| (From JCR) | WO 2015/098989, filed Dec. 24, 2014, | Apical domain |
| Clone M11 | “Novel anti-Transferrin receptor | (residues 230-244 and |
| Clone M23 | antibody that passes through blood- | 326-347 of TfR) and |
| Clone M27 | brain barrier” | protease-like domain |
| Clone B84 | U.S. Pat. No. 9,994,641, filed | (residues 461-473) |
| | Dec. 24, 2014, “Novel anti-Transferrin | |
| | receptor antibody that passes through | |
| | blood-brain barrier” | |
| (From | WO 2016/081643, filed May 26, 2016, | Apical domain and |
| Genentech) | entitled “ANTI-TRANSFERRIN | non-apical regions |
| 7A4, 8A2, | RECEPTOR ANTIBODIES AND | |
| 15D2, 10D11, | METHODS OF USE” | |
| 7B10, 15G11, | U.S. Pat. No. 9,708,406, filed | |
| 16G5, 13C3, | May 20, 2014, “Anti-transferrin receptor | |
| 16G4, 16F6, | antibodies and methods of use” | |
| 7G7, 4C2, | | |
| 1B12, and | | |
| 13D4 | | |
| (From | Lee et al. “Targeting Rat Anti-Mouse | |
| Armagen) | Transferrin Receptor Monoclonal | |
| 8D3 | Antibodies through Blood-Brain | |
| | Barrier in Mouse” 2000, J Pharmacol. | |
| | Exp. Ther., 292: 1048-1052. | |
| | US Patent App. 2010/077498, filed | |
| | Sep. 11, 2008, entitled “COMPOSITIONS | |
| | AND METHODS FOR BLOOD- | |
| | BRAIN BARRIER DELIVERY IN | |
| | THE MOUSE” | |
| OX26 | Haobam, B. et al. 2014. Rab17- | |
| | mediated recycling endosomes | |
| | contribute to autophagosome formation | |
| | in response to Group A Streptococcus | |
| | invasion. Cellular microbiology. 16: | |
| | 1806-21. | |
| DF1513 | Ortiz-Zapater E et al. Trafficking of | |
| | the human transferrin receptor in plant | |
| | cells: effects of tyrphostin A23 and | |
| | brefeldin A. Plant J 48: 757-70 (2006). | |
| 1A1B2, | Commercially available anti-transferrin | Novus Biologicals |
| 66IG10, | receptor antibodies. | 8100 Southpark Way, |
| MEM-189, | | A-8 Littleton CO |
| JF0956, 29806, | | 80120 |
| 1A1B2, | | |
| TFRC/1818, | | |
| 1E6, 66Ig10, | | |
| TFRC/1059, | | |
| Q1/71, 23D10, | | |
| 13E4, | | |
| TFRC/1149, | | |
| ER-MP21, | | |
| YTA74.4, | | |
| BU54, 2B6, | | |
| RI7 217 | | |
| (From | US Patent App. 2011/0311544A1, filed | Does not compete |
| INSERM) | Jun. 15, 2005, entitled “ANTI-CD71 | with OKT9 |
| BA120g | MONOCLONAL ANTIBODIES AND | |
| | USES THEREOF FOR TREATING | |
| | MALIGNANT TUMOR CELLS” | |
| LUCA31 | U.S. Pat. No. 7,572,895, filed | “LUCA31 epitope” |
| | Jun. 7, 2004, entitled “TRANSFERRIN | |
| | RECEPTOR ANTIBODIES” | |
| (Salk Institute) | Trowbridge, I. S. et al. “Anti-transferrin | |
| B3/25 | receptor monoclonal antibody and | |
| T58/30 | toxin-antibody conjugates affect | |
| | growth of human tumour cells.” | |
| | Nature, 1981, volume 294, pages 171- | |
| | 173 | |
| R17 217.1.3, | Commercially available anti-transferrin | BioXcell |
| 5E9C11, | receptor antibodies. | 10 Technology Dr., |
| OKT9 | | Suite 2B |
| (BE0023 | | West Lebanon, NH |
| clone) | | 03784-1671 USA |
| BK19.9, | Gatter, K. C. et al. “Transferrin | |
| B3/25, T56/14 | receptors in human tissues: their | |
| and T58/1 | distribution and possible clinical | |
| | relevance.” J Clin Pathol. 1983 | |
| | May; 36(5): 539-45. | |

| | Additional Anti-TfR SEQ ID NOs | | | | |
|---|---|---|---|---|---|
| Anti-TfR antibody | | VH/VL | CDR1 | CDR2 | CDR3 |
| CDRH1 (SEQ ID NO: 2265) | VH1 | 2280 | 2273 | 2274 | 2267 |
| CDRH2 (SEQ ID NO: 2266) | VH2 | 2281 | 2273 | 2275 | 2267 |
| CDRH3 (SEQ ID NO: 2267) | VH3 | 2282 | 2273 | 2276 | 2267 |
| CDRL1 (SEQ ID NO: 2268) | VH4 | 2283 | 2273 | 2275 | 2267 |
| CDRL2 (SEQ ID NO: 2269) | VL1 | 2284 | 2268 | 2269 | 115 |
| CDRL3 (SEQ ID NO: 2270) | VL2 | 2285 | 2268 | 2269 | 115 |
| VH (SEQ ID NO: 2271) | VL3 | 2286 | 2268 | 2277 | 2270 |
| VL (SEQ ID NO: 2272) | VL4 | 2287 | 2278 | 2279 | 2270 |

[0241] In some embodiments, transferrin receptor antibodies of the present disclosure include one or more of the CDR-H (e.g., CDR-H1, CDR-H2, and CDR-H3) amino acid sequences from any one of the anti-transferrin receptor antibodies selected from Table 8. In some embodiments, transferrin receptor antibodies include the CDR-H1, CDR-H2, and CDR-H3 as provided for any one of the anti-transferrin receptor antibodies selected from Table 8. In some embodiments, anti-transferrin receptor antibodies include the CDR-L1, CDR-L2, and CDR-L3 as provided for any one of the anti-transferrin receptor antibodies selected from Table 8. In some embodiments, anti-transferrin antibodies include the CDR-H1, CDR-H2, CDR-H3, CDR-L1, CDR-L2, and CDR-L3 as provided for any one of the anti-transferrin receptor antibodies selected from Table 8. The disclosure also includes any nucleic acid sequence that encodes a molecule comprising a CDR-H1, CDR-H2, CDR-H3, CDR-L1, CDR-L2, or CDR-L3 as provided for any one of the anti-transferrin receptor antibodies selected from Table 8. In some embodiments, antibody heavy and light chain CDR3 domains may play a particularly important role in the binding specificity/affinity of an antibody for an antigen. Accordingly, anti-transferrin receptor antibodies of the disclosure may include at least the heavy and/or (e.g., and) light chain CDR3s of any one of the anti-transferrin receptor antibodies selected from Table 8.

[0242] In some examples, any of the anti-transferrin receptor antibodies of the disclosure have one or more CDR (e.g., CDR-H or CDR-L) sequences substantially similar to any of the CDR-H1, CDR-H2, CDR-H3, CDR-L1, CDR-L2, and/or (e.g., and) CDR-L3 sequences from one of the anti-transferrin receptor antibodies selected from Table 8. In some embodiments, the position of one or more CDRs along the VH (e.g., CDR-H1, CDR-H2, or CDR-H3) and/or (e.g., and) VL (e.g., CDR-L1, CDR-L2, or CDR-L3) region of an antibody described herein can vary by one, two, three, four, five, or six amino acid positions so long as immunospecific binding to transferrin receptor (e.g., human transferrin receptor) is maintained (e.g., substantially maintained, for example, at least 50%, at least 60%, at least 70%, at least 80%, at least 90%, at least 95% of the binding of the original antibody from which it is derived). For example, in some embodiments, the position defining a CDR of any antibody described herein can vary by shifting the N-terminal and/or (e.g., and)C-terminal boundary of the CDR by one, two, three, four, five, or six amino acids, relative to the CDR position of any one of the antibodies described herein, so long as immunospecific binding to transferrin receptor (e.g., human transferrin receptor) is maintained (e.g., substantially maintained, for example, at least 50%, at least 60%, at least 70%, at least 80%, at least 90%, at least 95% of the binding of the original antibody from which it is derived). In another embodiment, the length of one or more CDRs along the VH (e.g., CDR-H1, CDR-H2, or CDR-H3) and/or (e.g., and) VL (e.g., CDR-L1, CDR-L2, or CDR-L3) region of an antibody described herein can vary (e.g., be shorter or longer) by one, two, three, four, five, or more amino acids, so long as immunospecific binding to transferrin receptor (e.g., human transferrin receptor) is maintained (e.g., substantially maintained, for example, at least 50%, at least 60%, at least 70%, at least 80%, at least 90%, at least 95% of the binding of the original antibody from which it is derived).

[0243] Accordingly, in some embodiments, a CDR-L1, CDR-L2, CDR-L3, CDR-H1, CDR-H2, and/or (e.g., and) CDR-H3 described herein may be one, two, three, four, five or more amino acids shorter than one or more of the CDRs described herein (e.g., CDRS from any of the anti-transferrin receptor antibodies selected from Table 8) so long as immunospecific binding to transferrin receptor (e.g., human transferrin receptor) is maintained (e.g., substantially maintained, for example, at least 50%, at least 60%, at least 70%, at least 80%, at least 90%, at least 95% relative to the binding of the original antibody from which it is derived). In some embodiments, a CDR-L1, CDR-L2, CDR-L3, CDR-H1, CDR-H2, and/or (e.g., and) CDR-H3 described herein may be one, two, three, four, five or more amino acids longer than one or more of the CDRs described herein (e.g., CDRS from any of the anti-transferrin receptor antibodies selected from Table 8) so long as immunospecific binding to transferrin receptor (e.g., human transferrin receptor) is maintained (e.g., substantially maintained, for example, at least 50%, at least 60%, at least 70%, at least 80%, at least 90%, at least 95% relative to the binding of the original antibody from which it is derived). In some embodiments, the amino portion of a CDR-L1, CDR-L2, CDR-L3, CDR-H1, CDR-H2, and/or (e.g., and) CDR-H3 described herein can be extended by one, two, three, four, five or more amino acids compared to one or more of the CDRs described herein (e.g., CDRS from any of the anti-transferrin receptor antibodies selected from Table 8) so long as immunospecific binding to transferrin receptor (e.g., human transferrin receptor is maintained (e.g., substantially maintained, for example, at least 50%, at least 60%, at least 70%, at least 80%, at least 90%, at least 95% relative to the binding of the original antibody from which it is derived). In some embodiments, the carboxy portion of a CDR-L1, CDR-L2, CDR-L3, CDR-H1, CDR-H2, and/or (e.g., and) CDR-H3 described herein can be extended by one, two, three, four, five or more amino acids compared to one or more of the CDRs described herein (e.g., CDRS from any of the anti-transferrin receptor antibodies selected from Table 8) so long as immunospecific binding to transferrin receptor (e.g., human transferrin receptor) is maintained (e.g., substantially maintained, for example, at least 50%, at least 60%, at least 70%, at least 80%, at least 90%, at least 95% relative to the binding of the original antibody from which it is derived). In some embodiments, the amino portion of a CDR-L1, CDR-L2, CDR-L3, CDR-H1, CDR-H2, and/or (e.g., and) CDR-H3 described herein can be shortened by one, two, three, four, five or more amino acids compared to one or more of the CDRs described herein (e.g., CDRS from any of the anti-transferrin receptor antibodies selected from Table 8) so long as immunospecific binding to transferrin receptor (e.g., human transferrin receptor) is maintained (e.g., substantially maintained, for example, at least 50%, at least 60%, at least 70%, at least 80%, at least 90%, at least 95% relative to the binding of the original antibody from which it is derived). In some embodiments, the carboxy portion of a CDR-L1, CDR-L2, CDR-L3, CDR-H1, CDR-H2, and/or (e.g., and) CDR-H3 described herein can be shortened by one, two, three, four, five or more amino acids compared to one or more of the CDRs described herein (e.g., CDRS from any of the anti-transferrin receptor antibodies selected from Table 8) so long as immunospecific binding to transferrin receptor (e.g., human transferrin receptor) is maintained (e.g., substantially maintained, for example, at least 50%, at least 60%, at least 70%, at least 80%, at least 90%, at least 95% relative to the binding of the original antibody from which it is derived). Any method can be used to ascertain whether immunospecific binding to transferrin receptor (e.g., human transferrin receptor) is maintained, for example, using binding assays and conditions described in the art.

[0244] In some examples, any of the anti-transferrin receptor antibodies of the disclosure have one or more CDR (e.g., CDR-H or CDR-L) sequences substantially similar to any one of the anti-transferrin receptor antibodies selected from Table 8. For example, the antibodies may include one or more CDR sequence(s) from any of the anti-transferrin receptor antibodies selected from Table 8 containing up to 5, 4, 3, 2, or 1 amino acid residue variations as compared to the corresponding CDR region in any one of the CDRs provided herein (e.g., CDRs from any of the anti-transferrin receptor antibodies selected from Table 8) so long as immunospecific binding to transferrin receptor (e.g., human transferrin receptor) is maintained (e.g., substantially maintained, for example, at least 50%, at least 60%, at least 70%, at least 80%, at least 90%, at least 95% relative to the binding of the original antibody from which it is derived). In some embodiments, any of the amino acid variations in any of the CDRs provided herein may be conservative variations. Conservative variations can be introduced into the CDRs at positions where the residues are not likely to be involved in interacting with a transferrin receptor protein (e.g., a human transferrin receptor protein), for example, as determined based on a crystal structure. Some aspects of the disclosure provide transferrin receptor antibodies that comprise one or more of the heavy chain variable (VH) and/or (e.g., and) light chain variable (VL) domains provided herein. In some embodiments, any of the VH domains provided herein include one or more of the CDR-H sequences (e.g., CDR-H1, CDR-H2, and CDR-H3) provided herein, for example, any of the CDR-H sequences provided in any one of the anti-transferrin receptor antibodies selected from Table 8. In some embodiments, any of the VL domains provided herein include one or more of the CDR-L sequences (e.g., CDR-L1, CDR-L2, and CDR-L3) provided herein, for example, any of the CDR-L sequences provided in any one of the anti-transferrin receptor antibodies selected from Table 8.

[0245] In some embodiments, anti-transferrin receptor antibodies of the disclosure include any antibody that includes a heavy chain variable domain and/or (e.g., and) a light chain variable domain of any anti-transferrin receptor antibody, such as any one of the anti-transferrin receptor antibodies selected from Table 8. In some embodiments, anti-transferrin receptor antibodies of the disclosure include any antibody that includes the heavy chain variable and light chain variable pairs of any anti-transferrin receptor antibody, such as any one of the anti-transferrin receptor antibodies selected from Table 8.

[0246] Aspects of the disclosure provide anti-transferrin receptor antibodies having a heavy chain variable (VH) and/or (e.g., and) a light chain variable (VL) domain amino acid sequence homologous to any of those described herein. In some embodiments, the anti-transferrin receptor antibody comprises a heavy chain variable sequence or a light chain variable sequence that is at least 75% (e.g., 80%, 85%, 90%, 95%, 98%, or 99%) identical to the heavy chain variable sequence and/or any light chain variable sequence of any anti-transferrin receptor antibody, such as any one of the anti-transferrin receptor antibodies selected from Table 8. In some embodiments, the homologous heavy chain variable and/or (e.g., and) a light chain variable amino acid sequences do not vary within any of the CDR sequences provided herein. For example, in some embodiments, the degree of sequence variation (e.g., 75%, 80%, 85%, 90%, 95%, 98%, or 99%) may occur within a heavy chain variable and/or (e.g., and) a light chain variable sequence excluding any of the CDR sequences provided herein. In some embodiments, any of the anti-transferrin receptor antibodies provided herein comprise a heavy chain variable sequence and a light chain variable sequence that comprises a framework sequence that is at least 75%, 80%, 85%, 90%, 95%, 98%, or 99% identical to the framework sequence of any anti-transferrin receptor antibody, such as any one of the anti-transferrin receptor antibodies selected from Table 8.

[0247] In some embodiments, an anti-transferrin receptor antibody, which specifically binds to transferrin receptor (e.g., human transferrin receptor), comprises a light chain variable VL domain comprising any of the CDR-L domains (CDR-L1, CDR-L2, and CDR-L3), or CDR-L domain variants provided herein, of any of the anti-transferrin receptor antibodies selected from Table 8. In some embodiments, an anti-transferrin receptor antibody, which specifically binds to transferrin receptor (e.g., human transferrin receptor), comprises a light chain variable VL domain comprising the CDR-L1, the CDR-L2, and the CDR-L3 of any anti-transferrin receptor antibody, such as any one of the anti-transferrin receptor antibodies selected from Table 8. In some embodiments, the anti-transferrin receptor antibody comprises a light chain variable (VL) region sequence comprising one, two, three or four of the framework regions of the light chain variable region sequence of any anti-transferrin receptor antibody, such as any one of the anti-transferrin receptor antibodies selected from Table 8. In some embodiments, the anti-transferrin receptor antibody comprises one, two, three or four of the framework regions of a light chain variable region sequence which is at least 75%, 80%, 85%, 90%, 95%, or 100% identical to one, two, three or four of the framework regions of the light chain variable region sequence of any anti-transferrin receptor antibody, such as any one of the anti-transferrin receptor antibodies selected from Table 8. In some embodiments, the light chain variable framework region that is derived from said amino acid sequence consists of said amino acid sequence but for the presence of up to 10 amino acid substitutions, deletions, and/or (e.g., and) insertions, preferably up to 10 amino acid substitutions. In some embodiments, the light chain variable framework region that is derived from said amino acid sequence consists of said amino acid sequence with 1, 2, 3, 4, 5, 6, 7, 8, 9 or 10 amino acid residues being substituted for an amino acid found in an analogous position in a corresponding non-human, primate, or human light chain variable framework region.

[0248] In some embodiments, an anti-transferrin receptor antibody that specifically binds to transferrin receptor comprises the CDR-L1, the CDR-L2, and the CDR-L3 of any anti-transferrin receptor antibody, such as any one of the anti-transferrin receptor antibodies selected from Table 8. In some embodiments, the antibody further comprises one, two, three or all four VL framework regions derived from the VL of a human or primate antibody. The primate or human light chain framework region of the antibody selected for use with the light chain CDR sequences described herein, can have, for example, at least 70% (e.g., at least 75%, 80%, 85%, 90%, 95%, 98%, or at least 99%) identity with a light chain framework region of a non-human parent antibody. The primate or human antibody selected can have the same or substantially the same number of amino acids in its light chain complementarity determining regions to that of the light chain complementarity determining regions of any of the antibodies provided herein, e.g., any of the anti-transferrin receptor antibodies selected from Table 8. In some embodiments, the primate or human light chain framework region amino acid residues are from a natural primate or human antibody light chain framework region having at least 75% identity, at least 80% identity, at least 85% identity, at least 90% identity, at least 95% identity, at least 98% identity, at least 99% (or more) identity with the light chain framework regions of any anti-transferrin receptor antibody, such as any one of the anti-transferrin receptor antibodies selected from Table 8. In some embodiments, an anti-transferrin receptor antibody further comprises one, two, three or all four VL framework regions derived from a human light chain variable kappa subfamily. In some embodiments, an anti-transferrin receptor antibody further comprises one, two, three or all four VL framework regions derived from a human light chain variable lambda subfamily.

[0249] In some embodiments, any of the anti-transferrin receptor antibodies provided herein comprise a light chain variable domain that further comprises a light chain constant region. In some embodiments, the light chain constant region is a kappa, or a lambda light chain constant region. In some embodiments, the kappa or lambda light chain constant region is from a mammal, e.g., from a human, monkey, rat, or mouse. In some embodiments, the light chain constant region is a human kappa light chain constant region. In some embodiments, the light chain constant region is a human lambda light chain constant region. It should be appreciated that any of the light chain constant regions provided herein may be variants of any of the light chain constant regions provided herein. In some embodiments, the light chain constant region comprises an amino acid sequence that is at least 75%, 80%, 85%, 90%, 95%, 98%, or 99% identical to any of the light chain constant regions of any anti-transferrin receptor antibody, such as any one of the anti-transferrin receptor antibodies selected from Table 8.

[0250] In some embodiments, the anti-transferrin receptor antibody is any anti-transferrin receptor antibody, such as any one of the anti-transferrin receptor antibodies selected from Table 8.

[0251] In some embodiments, an anti-transferrin receptor antibody comprises a VL domain comprising the amino acid sequence of any anti-transferrin receptor antibody, such as any one of the anti-transferrin receptor antibodies selected from Table 8, and wherein the constant regions comprise the amino acid sequences of the constant regions of an IgG, IgE, IgM, IgD, IgA or IgY immunoglobulin molecule, or a human IgG, IgE, IgM, IgD, IgA or IgY immunoglobulin molecule. In some embodiments, an anti-transferrin receptor antibody comprises any of the VL domains, or VL domain variants, and any of the VH domains, or VH domain variants, wherein the VL and VH domains, or variants thereof, are from the same antibody clone, and wherein the constant regions comprise the amino acid sequences of the constant regions of an IgG, IgE, IgM, IgD, IgA or IgY immunoglobulin molecule, any class (e.g., IgG1, IgG2, IgG3, IgG4, IgA1 and IgA2), or any subclass (e.g., IgG2a and IgG2b) of immunoglobulin molecule. Non-limiting examples of human constant regions are described in the art, e.g., see Kabat E A et al., (1991) supra.

[0252] In some embodiments, the muscle-targeting agent is a transferrin receptor antibody (e.g., the antibody and variants thereof as described in International Application Publication WO 2016/081643, incorporated herein by reference).

[0253] The heavy chain and light chain CDRs of the antibody according to different definition systems are provided in Table 9. The different definition systems, e.g., the Kabat definition, the Chothia definition, and/or (e.g., and) the contact definition have been described. See, e.g., (e.g., Kabat, E. A., et al. (1991) Sequences of Proteins of Immunological Interest, Fifth Edition, U.S. Department of Health and Human Services, NIH Publication No. 91-3242, Chothia et al., (1989) Nature 342:877; Chothia, C. et al. (1987) J. Mol. Biol. 196:901-917, Al-lazikani et al (1997) J. Molec. Biol. 273:927-948; and Almagro, J. Mol. Recognit. 17:132-143 (2004). See also hgmp.mrc.ac.uk and bioinf.org.uk/abs).

TABLE 9
Heavy chain and light chain CDRs of a mouse transferrin receptor
antibody

| CDRs | Kabat | Chothia | Contact |
|---|---|---|---|
| CDR-H1 | SYWMH (SEQ ID NO: | GYTFTSY (SEQ ID NO: | TSYWMH (SEQ ID NO: |
| | 110) | 116) | 118) |
| CDR-H2 | EINPTNGRTNYIEKFKS | NPTNGR (SEQ ID NO: | WIGEINPTNGRTN |
| | (SEQ ID NO: 111) | 117) | (SEQ ID NO: 119) |
| CDR-H3 | GTRAYHY (SEQ ID | GTRAYHY (SEQ ID | ARGTRA (SEQ ID NO: |
| | NO: 112) | NO: 112) | 120) |
| CDR-L1 | RASDNLYSNLA (SEQ | RASDNLYSNLA (SEQ | YSNLAWY (SEQ ID |
| | ID NO: 113) | ID NO: 113) | NO: 121) |
| CDR-L2 | DATNLAD (SEQ ID | DATNLAD (SEQ ID | LLVYDATNLA (SEQ |
| | NO: 114) | NO: 114) | ID NO: 122) |
| CDR-L3 | QHFWGTPLT (SEQ ID | QHFWGTPLT (SEQ ID | QHFWGTPL (SEQ ID |
| | NO: 115) | NO: 115) | NO: 123) |

[0254] The heavy chain variable domain (VH) and light chain variable domain sequences are also provided:

VH
(SEQ ID NO: 124)
QVQLQQPGAELVKPGASVKLSCKASGYTFTSYWMHWVKQRPGQGLEWIG
EINPTNGRTNYIEKFKSKATLTVDKSSSTAYMQLSSLTSEDSAVYYCAR
GTRAYHYWGQGTSVTVSS
VL
(SEQ ID NO: 125)
DIQMTQSPASLSVSVGETVTITCRASDNLYSNLAWYQQKQGKSPQLLVY
DATNLADGVPSRFSGSGSGTQYSLKINSLQSEDFGTYYCQHFWGTPLTF
GAGTKLELK

[0255] In some embodiments, the transferrin receptor antibody of the present disclosure comprises a CDR-H1, a CDR-H2, and a CDR-H3 that are the same as the CDR-H1, CDR-H2, and CDR-H3 shown in Table 9. Alternatively or in addition (e.g., in addition), the transferrin receptor antibody of the present disclosure comprises a CDR-L1, a CDR-L2, and a CDR-L3 that are the same as the CDR-L1, CDR-L2, and CDR-L3 shown in Table 9.

[0256] In some embodiments, the transferrin receptor antibody of the present disclosure comprises a CDR-H1, a CDR-H2, and a CDR-H3, which collectively contains no more than 5 amino acid variations (e.g., no more than 5, 4, 3, 2, or 1 amino acid variation) as compared with the CDR-H1, CDR-H2, and CDR-H3 as shown in Table 9. “Collectively” means that the total number of amino acid variations in all of the three heavy chain CDRs is within the defined range. Alternatively or in addition (e.g., in addition), the transferrin receptor antibody of the present disclosure may comprise a CDR-L1, a CDR-L2, and a CDR-L3, which collectively contains no more than 5 amino acid variations (e.g., no more than 5, 4, 3, 2 or 1 amino acid variation) as compared with the CDR-L1, CDR-L2, and CDR-L3 as shown in Table 9.

[0257] In some embodiments, the transferrin receptor antibody of the present disclosure comprises a CDR-H1, a CDR-H2, and a CDR-H3, at least one of which contains no more than 3 amino acid variations (e.g., no more than 3, 2, or 1 amino acid variation) as compared with the counterpart heavy chain CDR as shown in Table 9. Alternatively or in addition (e.g., in addition), the transferrin receptor antibody of the present disclosure may comprise CDR-L1, a CDR-L2, and a CDR-L3, at least one of which contains no more than 3 amino acid variations (e.g., no more than 3, 2, or 1 amino acid variation) as compared with the counterpart light chain CDR as shown in Table 9.

[0258] In some embodiments, the transferrin receptor antibody of the present disclosure comprises a CDR-L3, which contains no more than 3 amino acid variations (e.g., no more than 3, 2, or 1 amino acid variation) as compared with the CDR-L3 as shown in Table 9. In some embodiments, the transferrin receptor antibody of the present disclosure comprises a CDR-L3 containing one amino acid variation as compared with the CDR-L3 as shown in Table 9. In some embodiments, the transferrin receptor antibody of the present disclosure comprises a CDR-L3 of QHFAGTPLT (SEQ ID NO: 126) according to the Kabat and Chothia definition system) or QHFAGTPL (SEQ ID NO: 127) according to the Contact definition system). In some embodiments, the transferrin receptor antibody of the present disclosure comprises a CDR-H1, a CDR-H2, a CDR-H3, a CDR-L1 and a CDR-L2 that are the same as the CDR-H1, CDR-H2, and CDR-H3 shown in Table 9, and comprises a CDR-L3 of QHFAGTPLT (SEQ ID NO: 126) according to the Kabat and Chothia definition system) or QHFAGTPL (SEQ ID NO: 127) according to the Contact definition system).

[0259] In some embodiments, the transferrin receptor antibody of the present disclosure comprises heavy chain CDRs that collectively are at least 80% (e.g., 80%, 85%, 90%, 95%, or 98%) identical to the heavy chain CDRs as shown in Table 9. Alternatively or in addition (e.g., in addition), the transferrin receptor antibody of the present disclosure comprises light chain CDRs that collectively are at least 80% (e.g., 80%, 85%, 90%, 95%, or 98%) identical to the light chain CDRs as shown in Table 9.

[0260] In some embodiments, the transferrin receptor antibody of the present disclosure comprises a VH comprising the amino acid sequence of SEQ ID NO: 124. Alternatively or in addition (e.g., in addition), the transferrin receptor antibody of the present disclosure comprises a VL comprising the amino acid sequence of SEQ ID NO: 125.

[0261] In some embodiments, the transferrin receptor antibody of the present disclosure comprises a VH containing no more than 25 amino acid variations (e.g., no more than 25, 24, 23, 22, 21, 20, 19, 18, 17, 16, 15, 14, 13, 12, 11, 10, 9, 8,7, 6, 5,4, 3,2, or 1 amino acid variation) as compared with the VH as set forth in SEQ ID NO: 124. Alternatively or in addition (e.g., in addition), the transferrin receptor antibody of the present disclosure comprises a VL containing no more than 15 amino acid variations (e.g., no more than 20, 19, 18, 17, 16, 15, 14, 13, 12, 11, 9, 8, 7, 6, 5, 4, 3, 2, or 1 amino acid variation) as compared with the VL as set forth in SEQ ID NO: 125.

[0262] In some embodiments, the transferrin receptor antibody of the present disclosure comprises a VH comprising an amino acid sequence that is at least 80% (e.g., 80%, 85%, 90%, 95%, or 98%) identical to the VH as set forth in SEQ ID NO: 124. Alternatively or in addition (e.g., in addition), the transferrin receptor antibody of the present disclosure comprises a VL comprising an amino acid sequence that is at least 80% (e.g., 80%, 85%, 90%, 95%, or 98%) identical to the VL as set forth in SEQ ID NO: 125.

[0263] In some embodiments, the transferrin receptor antibody of the present disclosure is a humanized antibody (e.g., a humanized variant of an antibody). In some embodiments, the transferrin receptor antibody of the present disclosure comprises a CDR-H1, a CDR-H2, a CDR-H3, a CDR-L1, a CDR-L2, and a CDR-L3 that are the same as the CDR-H1, CDR-H2, and CDR-H3 shown in Table 9, and comprises a humanized heavy chain variable region and/or (e.g., and) a humanized light chain variable region.

[0264] Humanized antibodies are human immunoglobulins (recipient antibody) in which residues from a complementary determining region (CDR) of the recipient are replaced by residues from a CDR of a non-human species (donor antibody) such as mouse, rat, or rabbit having the desired specificity, affinity, and capacity. In some embodiments, Fv framework region (FR) residues of the human immunoglobulin are replaced by corresponding non-human residues. Furthermore, the humanized antibody may comprise residues that are found neither in the recipient antibody nor in the imported CDR or framework sequences, but are included to further refine and optimize antibody performance. In general, the humanized antibody will comprise substantially all of at least one, and typically two, variable domains, in which all or substantially all of the CDR regions correspond to those of a non-human immunoglobulin and all or substantially all of the FR regions are those of a human immunoglobulin consensus sequence. The humanized antibody optimally also will comprise at least a portion of an immunoglobulin constant region or domain (Fc), typically that of a human immunoglobulin. Antibodies may have Fc regions modified as described in WO 99/58572. Other forms of humanized antibodies have one or more CDRs (one, two, three, four, five, six) which are altered with respect to the original antibody, which are also termed one or more CDRs derived from one or more CDRs from the original antibody. Humanized antibodies may also involve affinity maturation.

[0265] In some embodiments, humanization is achieved by grafting the CDRs (e.g., as shown in Table 9) into the IGKV1-NL1*01 and IGHV1-3*01 human variable domains. In some embodiments, the transferrin receptor antibody of the present disclosure is a humanized variant comprising one or more amino acid substitutions at positions 9, 13, 17, 18, 40, 45, and 70 as compared with the VL as set forth in SEQ ID NO: 125, and/or (e.g., and) one or more amino acid substitutions at positions 1, 5, 7, 11, 12, 20, 38, 40, 44, 66, 75, 81, 83, 87, and 108 as compared with the VH as set forth in SEQ ID NO: 124. In some embodiments, the transferrin receptor antibody of the present disclosure is a humanized variant comprising amino acid substitutions at all of positions 9, 13, 17, 18, 40, 45, and 70 as compared with the VL as set forth in SEQ ID NO: 125, and/or (e.g., and) amino acid substitutions at all of positions 1, 5, 7, 11, 12, 20, 38, 40, 44, 66, 75, 81, 83, 87, and 108 as compared with the VH as set forth in SEQ ID NO: 124.

[0266] In some embodiments, the transferrin receptor antibody of the present disclosure is a humanized antibody and contains the residues at positions 43 and 48 of the VL as set forth in SEQ ID NO: 125. Alternatively or in addition (e.g., in addition), the transferrin receptor antibody of the present disclosure is a humanized antibody and contains the residues at positions 48, 67, 69, 71, and 73 of the VH as set forth in SEQ ID NO: 124.

[0267] The VH and VL amino acid sequences of an example humanized antibody that may be used in accordance with the present disclosure are provided:

Humanized VH
(SEQ ID NO: 128)
EVQLVQSGAEVKKPGASVKVSCKASGYTFTSYWMHWVRQAPGQRLEWIG
EINPTNGRTNYIEKFKSRATLTVDKSASTAYMELSSLRSEDTAVYYCAR
GTRAYHYWGQGTMVTVSS
Humanized VL
(SEQ ID NO: 129)
DIQMTQSPSSLSASVGDRVTITCRASDNLYSNLAWYQQKPGKSPKLLVY
DATNLADGVPSRFSGSGSGTDYTLTISSLQPEDFATYYCQHFWGTPLTF
GQGTKVEIK

[0268] In some embodiments, the transferrin receptor antibody of the present disclosure comprises a VH comprising the amino acid sequence of SEQ ID NO: 128. Alternatively or in addition (e.g., in addition), the transferrin receptor antibody of the present disclosure comprises a VL comprising the amino acid sequence of SEQ ID NO: 129.

[0269] In some embodiments, the transferrin receptor antibody of the present disclosure comprises a VH containing no more than 25 amino acid variations (e.g., no more than 25, 24, 23, 22, 21, 20, 19, 18, 17, 16, 15, 14, 13, 12, 11, 10, 9, 8,7, 6, 5,4, 3,2, or 1 amino acid variation) as compared with the VH as set forth in SEQ ID NO: 128. Alternatively or in addition (e.g., in addition), the transferrin receptor antibody of the present disclosure comprises a VL containing no more than 15 amino acid variations (e.g., no more than 20, 19, 18, 17, 16, 15, 14, 13, 12, 11, 9, 8, 7, 6, 5, 4, 3, 2, or 1 amino acid variation) as compared with the VL as set forth in SEQ ID NO: 129.

[0270] In some embodiments, the transferrin receptor antibody of the present disclosure comprises a VH comprising an amino acid sequence that is at least 80% (e.g., 80%, 85%, 90%, 95%, or 98%) identical to the VH as set forth in SEQ ID NO: 128. Alternatively or in addition (e.g., in addition), the transferrin receptor antibody of the present disclosure comprises a VL comprising an amino acid sequence that is at least 80% (e.g., 80%, 85%, 90%, 95%, or 98%) identical to the VL as set forth in SEQ ID NO: 129.

[0271] In some embodiments, the transferrin receptor antibody of the present disclosure is a humanized variant comprising amino acid substitutions at one or more of positions 43 and 48 as compared with the VL as set forth in SEQ ID NO: 125, and/or (e.g., and) amino acid substitutions at one or more of positions 48, 67, 69, 71, and 73 as compared with the VH as set forth in SEQ ID NO: 124. In some embodiments, the transferrin receptor antibody of the present disclosure is a humanized variant comprising a S43A and/or (e.g., and) a V48L mutation as compared with the VL as set forth in SEQ ID NO: 125, and/or (e.g., and) one or more of A67V, L69I, V71R, and K73T mutations as compared with the VH as set forth in SEQ ID NO: 124.

[0272] In some embodiments, the transferrin receptor antibody of the present disclosure is a humanized variant comprising amino acid substitutions at one or more of positions 9, 13, 17, 18, 40, 43, 48, 45, and 70 as compared with the VL as set forth in SEQ ID NO: 125, and/or (e.g., and) amino acid substitutions at one or more of positions 1, 5, 7, 11, 12, 20, 38, 40, 44, 48, 66, 67, 69, 71, 73, 75, 81, 83, 87, and 108 as compared with the VH as set forth in SEQ ID NO: 124.

[0273] In some embodiments, the transferrin receptor antibody of the present disclosure is a chimeric antibody, which can include a heavy constant region and a light constant region from a human antibody. Chimeric antibodies refer to antibodies having a variable region or part of variable region from a first species and a constant region from a second species. Typically, in these chimeric antibodies, the variable region of both light and heavy chains mimics the variable regions of antibodies derived from one species of mammals (e.g., a non-human mammal such as mouse, rabbit, and rat), while the constant portions are homologous to the sequences in antibodies derived from another mammal such as human. In some embodiments, amino acid modifications can be made in the variable region and/or (e.g., and) the constant region.

[0274] In some embodiments, the transferrin receptor antibody described herein is a chimeric antibody, which can include a heavy constant region and a light constant region from a human antibody. Chimeric antibodies refer to antibodies having a variable region or part of variable region from a first species and a constant region from a second species. Typically, in these chimeric antibodies, the variable region of both light and heavy chains mimics the variable regions of antibodies derived from one species of mammals (e.g., a non-human mammal such as mouse, rabbit, and rat), while the constant portions are homologous to the sequences in antibodies derived from another mammal such as human. In some embodiments, amino acid modifications can be made in the variable region and/or (e.g., and) the constant region.

[0275] In some embodiments, the heavy chain of any of the transferrin receptor antibodies as described herein may comprises a heavy chain constant region (CH) or a portion thereof (e.g., CH1, CH2, CH3, or a combination thereof). The heavy chain constant region can of any suitable origin, e.g., human, mouse, rat, or rabbit. In one specific example, the heavy chain constant region is from a human IgG (a gamma heavy chain), e.g., IgG1, IgG2, or IgG4. An example of a human IgG1 constant region is given below:

(SEQ ID NO: 130)
[sequence omitted]

[0276] In some embodiments, the light chain of any of the transferrin receptor antibodies described herein may further comprise a light chain constant region (CL), which can be any CL known in the art. In some examples, the CL is a kappa light chain. In other examples, the CL is a lambda light chain. In some embodiments, the CL is a kappa light chain, the sequence of which is provided below:

(SEQ ID NO: 83)
RTVAAPSVFIFPPSDEQLKSGTASVVCLLNNFYPREAKVQWKVDNALQSG
NSQESVTEQDSKDSTYSLSSTLTLSKADYEKHKVYACEVTHQGLSSPVTK
SFNRGEC

[0277] Other antibody heavy and light chain constant regions are well known in the art, e.g., those provided in the IMGT database (www.imgt.org) or at www.vbase2.org/vbstat.php., both of which are incorporated by reference herein.

[0278] Examples of heavy chain and light chain amino acid sequences of the transferrin receptor antibodies described are provided below:

Heavy Chain (VH + human IgG1 constant region)
(SEQ ID NO: 132)
QVQLQQPGAELVKPGASVKLSCKASGYTFTSYWMHWVKQRPGQGLEWIGE
INPTNGRTNYIEKFKSKATLTVDKSSSTAYMQLSSLTSEDSAVYYCARGT
RAYHYWGQGTSVTVSSASTKGPSVFPLAPSSKSTSGGTAALGCLVKDYFP
EPVTVSWNSGALTSGVHTFPAVLQSSGLYSLSSVVTVPSSSLGTQTYICN
VNHKPSNTKVDKKVEPKSCDKTHTCPPCPAPELLGGPSVFLFPPKPKDTL
MISRTPEVTCVVVDVSHEDPEVKFNWYVDGVEVHNAKTKPREEQYNSTYR
VVSVLTVLHQDWLNGKEYKCKVSNKALPAPIEKTISKAKGQPREPQVYTL
PPSRDELTKNQVSLTCLVKGFYPSDIAVEWESNGQPENNYKTTPPVLDSD
GSFFLYSKLTVDKSRWQQGNVFSCSVMHEALHNHYTQKSLSLSPGK
Light Chain (VL + kappa light chain)
(SEQ ID NO: 133)
DIQMTQSPASLSVSVGETVTITCRASDNLYSNLAWYQQKQGKSPQLLVYD
ATNLADGVPSRFSGSGSGTQYSLKINSLQSEDFGTYYCQHFWGTPLTFGA
GTKLELKRTVAAPSVFIFPPSDEQLKSGTASVVCLLNNFYPREAKVQWKV
DNALQSGNSQESVTEQDSKDSTYSLSSTLTLSKADYEKHKVYACEVTHQG
LSSPVTKSFNRGEC
Heavy Chain (humanized VH + human IgG1 constant
region)
(SEQ ID NO: 134)
EVQLVQSGAEVKKPGASVKVSCKASGYTFTSYWMHWVRQAPGQRLEWIGE
INPTNGRTNYIEKFKSRATLTVDKSASTAYMELSSLRSEDTAVYYCARGT
RAYHYWGQGTMVTVSSASTKGPSVFPLAPSSKSTSGGTAALGCLVKDYFP
EPVTVSWNSGALTSGVHTFPAVLQSSGLYSLSSVVTVPSSSLGTQTYICN
VNHKPSNTKVDKKVEPKSCDKTHTCPPCPAKPREEQYNSTYRVVSVLTVL
HQDWLNGKEYKCKVSNKALPAPIEKTISKAKGQPREPQVYTLPPSRDELT
KNQVSLTCLVKGFYPSDIAVEWESNGQPENNYKTTPPVLDSDGSFFLYSK
LTVDKSRWQQGNVFSCSVMHEALHNHYTQKSLSLSPGK
Light Chain (humanized VL + kappa light chain)
(SEQ ID NO: 135)
DIQMTQSPSSLSASVGDRVTITCRASDNLYSNLAWYQQKPGKSPKLLVYD
ATNLADGVPSRFSGSGSGTDYTLTISSLQPEDFATYYCQHFWGTPLTFGQ
GTKVEIKRTVAAPSVFIFPPSDEQLKSGTASVVCLLNNFYPREAKVQWKV
DNALQSGNSQESVTEQDSKDSTYSLSSTLTLSKADYEKHKVYACEVTHQG
LSSPVTKSFNRGEC

[0279] In some embodiments, the transferrin receptor antibody described herein comprises a heavy chain comprising an amino acid sequence that is at least 80% (e.g., 80%, 85%, 90%, 95%, or 98%) identical to SEQ ID NO: 132. Alternatively or in addition (e.g., in addition), the transferrin receptor antibody described herein comprises a light chain comprising an amino acid sequence that is at least 80% (e.g., 80%, 85%, 90%, 95%, or 98%) identical to SEQ ID NO: 133. In some embodiments, the transferrin receptor antibody described herein comprises a heavy chain comprising the amino acid sequence of SEQ ID NO: 132. Alternatively or in addition (e.g., in addition), the transferrin receptor antibody described herein comprises a light chain comprising the amino acid sequence of SEQ ID NO: 133.

[0280] In some embodiments, the transferrin receptor antibody of the present disclosure comprises a heavy chain containing no more than 25 amino acid variations (e.g., no more than 25, 24, 23, 22, 21, 20, 19, 18, 17, 16, 15, 14, 13, 12, 11, 10, 9, 8, 7, 6, 5, 4, 3, 2, or 1 amino acid variation) as compared with the heavy chain as set forth in SEQ ID NO: 132. Alternatively or in addition (e.g., in addition), the transferrin receptor antibody of the present disclosure comprises a light chain containing no more than 15 amino acid variations (e.g., no more than 20, 19, 18, 17, 16, 15, 14, 13, 12, 11, 9, 8, 7, 6, 5, 4, 3, 2, or 1 amino acid variation) as compared with the light chain as set forth in SEQ ID NO: 133.

[0281] In some embodiments, the transferrin receptor antibody described herein comprises a heavy chain comprising an amino acid sequence that is at least 80% (e.g., 80%, 85%, 90%, 95%, or 98%) identical to SEQ ID NO: 134. Alternatively or in addition (e.g., in addition), the transferrin receptor antibody described herein comprises a light chain comprising an amino acid sequence that is at least 80% (e.g., 80%, 85%, 90%, 95%, or 98%) identical to SEQ ID NO: 135. In some embodiments, the transferrin receptor antibody described herein comprises a heavy chain comprising the amino acid sequence of SEQ ID NO: 134. Alternatively or in addition (e.g., in addition), the transferrin receptor antibody described herein comprises a light chain comprising the amino acid sequence of SEQ ID NO: 135.

[0282] In some embodiments, the transferrin receptor antibody of the present disclosure comprises a heavy chain containing no more than 25 amino acid variations (e.g., no more than 25, 24, 23, 22, 21, 20, 19, 18, 17, 16, 15, 14, 13, 12, 11, 10, 9, 8, 7, 6, 5, 4, 3, 2, or 1 amino acid variation) as compared with the heavy chain of humanized antibody as set forth in SEQ ID NO: 134. Alternatively or in addition (e.g., in addition), the transferrin receptor antibody of the present disclosure comprises a light chain containing no more than 15 amino acid variations (e.g., no more than 20, 19, 18, 17, 16, 15, 14, 13, 12, 11, 9, 8, 7, 6, 5, 4, 3, 2, or 1 amino acid variation) as compared with the light chain of humanized antibody as set forth in SEQ ID NO: 135.

[0283] In some embodiments, the transferrin receptor antibody is an antigen binding fragment (Fab) of an intact antibody (full-length antibody). Antigen binding fragment of an intact antibody (full-length antibody) can be prepared via routine methods. For example, F(ab′)2 fragments can be produced by pepsin digestion of an antibody molecule, and Fab′ fragments that can be generated by reducing the disulfide bridges of F(ab′)2 fragments. Examples of Fab amino acid sequences of the transferrin receptor antibodies described herein are provided below:

Heavy Chain Fab (VH + a portion of human IgG1
constant region)
(SEQ ID NO: 136)
QVQLQQPGAELVKPGASVKLSCKASGYTFTSYWMHWVKQRPGQGLEWIGE
INPTNGRTNYIEKFKSKATLTVDKSSSTAYMQLSSLTSEDSAVYYCARGT
RAYHYWGQGTSVTVSSASTKGPSVFPLAPSSKSTSGGTAALGCLVKDYFP
EPVTVSWNSGALTSGVHTFPAVLQSSGLYSLSSVVTVPSSSLGTQTYICN
VNHKPSNTKVDKKVEPKSCDKTHTCP
Heavy Chain Fab (humanized VH + a portion of human
IgG1 constant region)
(SEQ ID NO: 137)
EVQLVQSGAEVKKPGASVKVSCKASGYTFTSYWMHWVRQAPGQRLEWIGE
INPTNGRTNYIEKFKSRATLTVDKSASTAYMELSSLRSEDTAVYYCARGT
RAYHYWGQGTMVTVSSASTKGPSVFPLAPSSKSTSGGTAALGCLVKDYFP
EPVTVSWNSGALTSGVHTFPAVLQSSGLYSLSSVVTVPSSSLGTQTYICN
VNHKPSNTKVDKKVEPKSCDKTHTCP

[0284] In some embodiments, the transferrin receptor antibody described herein comprises a heavy chain comprising the amino acid sequence of SEQ ID NO: 136. Alternatively or in addition (e.g., in addition), the transferrin receptor antibody described herein comprises a light chain comprising the amino acid sequence of SEQ ID NO: 133.

[0285] In some embodiments, the transferrin receptor antibody described herein comprises a heavy chain comprising the amino acid sequence of SEQ ID NO: 137. Alternatively or in addition (e.g., in addition), the transferrin receptor antibody described herein comprises a light chain comprising the amino acid sequence of SEQ ID NO: 135.

[0286] The transferrin receptor antibodies described herein can be in any antibody form, including, but not limited to, intact (i.e., full-length) antibodies, antigen-binding fragments thereof (such as Fab, Fab′, F(ab′)2, Fv), single chain antibodies, bi-specific antibodies, or nanobodies. In some embodiments, the transferrin receptor antibody described herein is a scFv. In some embodiments, the transferrin receptor antibody described herein is a scFv-Fab (e.g., scFv fused to a portion of a constant region). In some embodiments, the transferrin receptor antibody described herein is a scFv fused to a constant region (e.g., human IgG1 constant region as set forth in SEQ ID NO: 130).

[0287] In some embodiments, any one of the anti-TfR antibodies described herein is produced by recombinant DNA technology in Chinese hamster ovary (CHO) cell suspension culture, optionally in CHO-K1 cell (e.g., CHO-K1 cells derived from European Collection of Animal Cell Culture, Cat. No. 85051005) suspension culture.

[0288] In some embodiments, an antibody provided herein may have one or more post-translational modifications. In some embodiments, N-terminal cyclization, also called pyroglutamate formation (pyro-Glu), may occur in the antibody at N-terminal Glutamate (Glu) and/or Glutamine (Gln) residues during production. As such, it should be appreciated that an antibody specified as having a sequence comprising an N-terminal glutamate or glutamine residue encompasses antibodies that have undergone pyroglutamate formation resulting from a post-translational modification. In some embodiments, pyroglutamate formation occurs in a heavy chain sequence. In some embodiments, pyroglutamate formation occurs in a light chain sequence.

[0289] b. Other Muscle-Targeting Antibodies

[0290] In some embodiments, the muscle-targeting antibody is an antibody that specifically binds hemojuvelin, caveolin-3, Duchenne muscular dystrophy peptide, myosin Jib, or CD63. In some embodiments, the muscle-targeting antibody is an antibody that specifically binds a myogenic precursor protein. Exemplary myogenic precursor proteins include, without limitation, ABCG2, M-Cadherin/Cadherin-15, Caveolin-1, CD34, FoxK1, Integrin alpha 7, Integrin alpha 7 beta 1, MYF-5, MyoD, Myogenin, NCAM-1/CD56, Pax3, Pax7, and Pax9. In some embodiments, the muscle-targeting antibody is an antibody that specifically binds a skeletal muscle protein. Exemplary skeletal muscle proteins include, without limitation, alpha-Sarcoglycan, beta-Sarcoglycan, Calpain Inhibitors, Creatine Kinase MM/CKMM, eIF5A, Enolase 2/Neuron-specific Enolase, epsilon-Sarcoglycan, FABP3/H-FABP, GDF-8/Myostatin, GDF-11/GDF-8, Integrin alpha 7, Integrin alpha 7 beta 1, Integrin beta 1/CD29, MCAM/CD146, MyoD, Myogenin, Myosin Light Chain Kinase Inhibitors, NCAM-1/CD56, and Troponin I. In some embodiments, the muscle-targeting antibody is an antibody that specifically binds a smooth muscle protein. Exemplary smooth muscle proteins include, without limitation, alpha-Smooth Muscle Actin, VE-Cadherin, Caldesmon/CALD1, Calponin 1, Desmin, Histamine H2 R, Motilin R/GPR38, Transgelin/TAGLN, and Vimentin. However, it should be appreciated that antibodies to additional targets are within the scope of this disclosure and the exemplary lists of targets provided herein are not meant to be limiting.

[0291] c. Antibody Features/Alterations

[0292] In some embodiments, conservative mutations can be introduced into antibody sequences (e.g., CDRs or framework sequences) at positions where the residues are not likely to be involved in interacting with a target antigen (e.g., transferrin receptor), for example, as determined based on a crystal structure. In some embodiments, one, two or more mutations (e.g., amino acid substitutions) are introduced into the Fc region of a muscle-targeting antibody described herein (e.g., in a CH2 domain (residues 231-340 of human IgG1) and/or (e.g., and) CH3 domain (residues 341-447 of human IgG1) and/or (e.g., and) the hinge region, with numbering according to the Kabat numbering system (e.g., the EU index in Kabat)) to alter one or more functional properties of the antibody, such as serum half-life, complement fixation, Fc receptor binding and/or (e.g., and) antigen-dependent cellular cytotoxicity.

[0293] In some embodiments, one, two or more mutations (e.g., amino acid substitutions) are introduced into the hinge region of the Fc region (CH1 domain) such that the number of cysteine residues in the hinge region are altered (e.g., increased or decreased) as described in, e.g., U.S. Pat. No. 5,677,425. The number of cysteine residues in the hinge region of the CH1 domain can be altered to, e.g., facilitate assembly of the light and heavy chains, or to alter (e.g., increase or decrease) the stability of the antibody or to facilitate linker conjugation.

[0294] In some embodiments, one, two or more mutations (e.g., amino acid substitutions) are introduced into the Fc region of a muscle-targeting antibody described herein (e.g., in a CH2 domain (residues 231-340 of human IgG1) and/or (e.g., and) CH3 domain (residues 341-447 of human IgG1) and/or (e.g., and) the hinge region, with numbering according to the Kabat numbering system (e.g., the EU index in Kabat)) to increase or decrease the affinity of the antibody for an Fc receptor (e.g., an activated Fc receptor) on the surface of an effector cell. Mutations in the Fc region of an antibody that decrease or increase the affinity of an antibody for an Fc receptor and techniques for introducing such mutations into the Fc receptor or fragment thereof are known to one of skill in the art. Examples of mutations in the Fc receptor of an antibody that can be made to alter the affinity of the antibody for an Fc receptor are described in, e.g., Smith P et al., (2012) PNAS 109: 6181-6186, U.S. Pat. No. 6,737,056, and International Publication Nos. WO 02/060919; WO 98/23289; and WO 97/34631, which are incorporated herein by reference.

[0295] In some embodiments, one, two or more amino acid mutations (i.e., substitutions, insertions or deletions) are introduced into an IgG constant domain, or FcRn-binding fragment thereof (preferably an Fc or hinge-Fc domain fragment) to alter (e.g., decrease or increase) half-life of the antibody in vivo. See, e.g., International Publication Nos. WO 02/060919; WO 98/23289; and WO 97/34631; and U.S. Pat. Nos. 5,869,046, 6,121,022, 6,277,375 and 6,165,745 for examples of mutations that will alter (e.g., decrease or increase) the half-life of an antibody in vivo.

[0296] In some embodiments, one, two or more amino acid mutations (i.e., substitutions, insertions or deletions) are introduced into an IgG constant domain, or FcRn-binding fragment thereof (preferably an Fc or hinge-Fc domain fragment) to decrease the half-life of the anti-transferrin receptor antibody in vivo. In some embodiments, one, two or more amino acid mutations (i.e., substitutions, insertions or deletions) are introduced into an IgG constant domain, or FcRn-binding fragment thereof (preferably an Fc or hinge-Fc domain fragment) to increase the half-life of the antibody in vivo. In some embodiments, the antibodies can have one or more amino acid mutations (e.g., substitutions) in the second constant (CH2) domain (residues 231-340 of human IgG1) and/or (e.g., and) the third constant (CH3) domain (residues 341-447 of human IgG1), with numbering according to the EU index in Kabat (Kabat E A et al., (1991) supra). In some embodiments, the constant region of the IgG1 of an antibody described herein comprises a methionine (M) to tyrosine (Y) substitution in position 252, a serine (S) to threonine (T) substitution in position 254, and a threonine (T) to glutamic acid (E) substitution in position 256, numbered according to the EU index as in Kabat. See U.S. Pat. No. 7,658,921, which is incorporated herein by reference. This type of mutant IgG, referred to as “YTE mutant” has been shown to display fourfold increased half-life as compared to wild-type versions of the same antibody (see Dall'Acqua W F et al., (2006) J Biol Chem 281: 23514-24). In some embodiments, an antibody comprises an IgG constant domain comprising one, two, three or more amino acid substitutions of amino acid residues at positions 251-257, 285-290, 308-314, 385-389, and 428-436, numbered according to the EU index as in Kabat.

[0297] In some embodiments, one, two or more amino acid substitutions are introduced into an IgG constant domain Fc region to alter the effector function(s) of the anti-transferrin receptor antibody. The effector ligand to which affinity is altered can be, for example, an Fc receptor or the C1 component of complement. This approach is described in further detail in U.S. Pat. Nos. 5,624,821 and 5,648,260. In some embodiments, the deletion or inactivation (through point mutations or other means) of a constant region domain can reduce Fc receptor binding of the circulating antibody thereby increasing tumor localization. See, e.g., U.S. Pat. Nos. 5,585,097 and 8,591,886 for a description of mutations that delete or inactivate the constant domain and thereby increase tumor localization. In some embodiments, one or more amino acid substitutions may be introduced into the Fc region of an antibody described herein to remove potential glycosylation sites on Fc region, which may reduce Fc receptor binding (see, e.g., Shields R L et al., (2001) J Biol Chem 276: 6591-604).

[0298] In some embodiments, one or more amino in the constant region of a muscle-targeting antibody described herein can be replaced with a different amino acid residue such that the antibody has altered Clq binding and/or (e.g., and) reduced or abolished complement dependent cytotoxicity (CDC). This approach is described in further detail in U.S. Pat. No. 6,194,551 (Idusogie et al). In some embodiments, one or more amino acid residues in the N-terminal region of the CH2 domain of an antibody described herein are altered to thereby alter the ability of the antibody to fix complement. This approach is described further in International Publication No. WO 94/29351. In some embodiments, the Fc region of an antibody described herein is modified to increase the ability of the antibody to mediate antibody dependent cellular cytotoxicity (ADCC) and/or (e.g., and) to increase the affinity of the antibody for an Fcγ receptor. This approach is described further in International Publication No. WO 00/42072.

[0299] In some embodiments, the heavy and/or (e.g., and) light chain variable domain(s) sequence(s) of the antibodies provided herein can be used to generate, for example, CDR-grafted, chimeric, humanized, or composite human antibodies or antigen-binding fragments, as described elsewhere herein. As understood by one of ordinary skill in the art, any variant, CDR-grafted, chimeric, humanized, or composite antibodies derived from any of the antibodies provided herein may be useful in the compositions and methods described herein and will maintain the ability to specifically bind transferrin receptor, such that the variant, CDR-grafted, chimeric, humanized, or composite antibody has at least 50%, at least 60%, at least 70%, at least 80%, at least 90%, at least 95% or more binding to transferrin receptor relative to the original antibody from which it is derived.

[0300] In some embodiments, the antibodies provided herein comprise mutations that confer desirable properties to the antibodies. For example, to avoid potential complications due to Fab-arm exchange, which is known to occur with native IgG4 mAbs, the antibodies provided herein may comprise a stabilizing ‘Adair’ mutation (Angal S., et al., “A single amino acid substitution abolishes the heterogeneity of chimeric mouse/human (IgG4) antibody,” Mol Immunol 30, 105-108; 1993), where serine 228 (EU numbering; residue 241 Kabat numbering) is converted to proline resulting in an IgG1-like hinge sequence. Accordingly, any of the antibodies may include a stabilizing ‘Adair’ mutation.

[0301] As provided herein, antibodies of this disclosure may optionally comprise constant regions or parts thereof. For example, a VL domain may be attached at its C-terminal end to a light chain constant domain like Cκ or Cλ. Similarly, a VH domain or portion thereof may be attached to all or part of a heavy chain like IgA, IgD, IgE, IgG, and TgM, and any isotype subclass. Antibodies may include suitable constant regions (see, for example, Kabat et al., Sequences of Proteins of Immunological Interest, No. 91-3242, National Institutes of Health Publications, Bethesda, Md. (1991)). Therefore, antibodies within the scope of this may disclosure include VH and VL domains, or an antigen binding portion thereof, combined with any suitable constant regions.

[0302] ii. Muscle-Targeting Peptides

[0303] Some aspects of the disclosure provide muscle-targeting peptides as muscle-targeting agents. Short peptide sequences (e.g., peptide sequences of 5-20 amino acids in length) that bind to specific cell types have been described. For example, cell-targeting peptides have been described in Vines e., et al., A. “Cell-penetrating and cell-targeting peptides in drug delivery” Biochim Biophys Acta 2008, 1786: 126-38; Jarver P., et al., “In vivo biodistribution and efficacy of peptide mediated delivery” Trends Pharmacol Sci 2010; 31: 528-35; Samoylova T. I., et al., “Elucidation of muscle-binding peptides by phage display screening” Muscle Nerve 1999; 22: 460-6; U.S. Pat. No. 6,329,501, issued on Dec. 11, 2001, entitled “METHODS AND COMPOSITIONS FOR TARGETING COMPOUNDS TO MUSCLE”; and Samoylov A. M., et al., “Recognition of cell-specific binding of phage display derived peptides using an acoustic wave sensor.” Biomol Eng 2002; 18: 269-72; the entire contents of each of which are incorporated herein by reference. By designing peptides to interact with specific cell surface antigens (e.g., receptors), selectivity for a desired tissue, e.g., muscle, can be achieved. Skeletal muscle-targeting has been investigated and a range of molecular payloads are able to be delivered. These approaches may have high selectivity for muscle tissue without many of the practical disadvantages of a large antibody or viral particle. Accordingly, in some embodiments, the muscle-targeting agent is a muscle-targeting peptide that is from 4 to 50 amino acids in length. In some embodiments, the muscle-targeting peptide is 4, 5, 6,7, 8, 9, 10, 11, 12, 13, 14, 15, 16, 17, 18, 19, 20, 21, 22, 23, 24, 25, 26, 27, 28, 29, 30, 31, 32, 33, 34, 35, 36, 37, 38, 39, 40, 41, 42, 43, 44, 45, 46, 47, 48, 49, or 50 amino acids in length. Muscle-targeting peptides can be generated using any of several methods, such as phage display.

[0304] In some embodiments, a muscle-targeting peptide may bind to an internalizing cell surface receptor that is overexpressed or relatively highly expressed in muscle cells, e.g. a transferrin receptor, compared with certain other cells. In some embodiments, a muscle-targeting peptide may target, e.g., bind to, a transferrin receptor. In some embodiments, a peptide that targets a transferrin receptor may comprise a segment of a naturally occurring ligand, e.g., transferrin. In some embodiments, a peptide that targets a transferrin receptor is as described in U.S. Pat. No. 6,743,893, filed Nov. 30, 2000, “RECEPTOR-MEDIATED UPTAKE OF PEPTIDES THAT BIND THE HUMAN TRANSFERRIN RECEPTOR”. In some embodiments, a peptide that targets a transferrin receptor is as described in Kawamoto, M. et al, “A novel transferrin receptor-targeted hybrid peptide disintegrates cancer cell membrane to induce rapid killing of cancer cells.” BMC Cancer. 2011 Aug. 18; 11:359. In some embodiments, a peptide that targets a transferrin receptor is as described in U.S. Pat. No. 8,399,653, filed May 20, 2011, “TRANSFERRIN/TRANSFERRIN RECEPTOR-MEDIATED SIRNA DELIVERY”.

[0305] As discussed above, examples of muscle targeting peptides have been reported. For example, muscle-specific peptides were identified using phage display library presenting surface heptapeptides. As one example a peptide having the amino acid sequence ASSLNIA (SEQ ID NO: 138) bound to C2C12 murine myotubes in vitro, and bound to mouse muscle tissue in vivo. Accordingly, in some embodiments, the muscle-targeting agent comprises the amino acid sequence ASSLNIA (SEQ ID NO: 138). This peptide displayed improved specificity for binding to heart and skeletal muscle tissue after intravenous injection in mice with reduced binding to liver, kidney, and brain. Additional muscle-specific peptides have been identified using phage display. For example, a 12 amino acid peptide was identified by phage display library for muscle targeting in the context of treatment for DMD. See, Yoshida D., et al., “Targeting of salicylate to skin and muscle following topical injections in rats.” Int J Pharm 2002; 231: 177-84; the entire contents of which are hereby incorporated by reference. Here, a 12 amino acid peptide having the sequence SKTFNTHPQSTP (SEQ ID NO: 139) was identified and this muscle-targeting peptide showed improved binding to C2C12 cells relative to the ASSLNIA (SEQ ID NO: 138) peptide.

[0306] An additional method for identifying peptides selective for muscle (e.g., skeletal muscle) over other cell types includes in vitro selection, which has been described in Ghosh D., et al., “Selection of muscle-binding peptides from context-specific peptide-presenting phage libraries for adenoviral vector targeting” J Virol 2005; 79: 13667-72; the entire contents of which are incorporated herein by reference. By pre-incubating a random 12-mer peptide phage display library with a mixture of non-muscle cell types, non-specific cell binders were selected out. Following rounds of selection the 12 amino acid peptide TARGEHKEEELI (SEQ ID NO: 140) appeared most frequently. Accordingly, in some embodiments, the muscle-targeting agent comprises the amino acid sequence TARGEHKEEELI (SEQ ID NO: 140).

[0307] A muscle-targeting agent may an amino acid-containing molecule or peptide. A muscle-targeting peptide may correspond to a sequence of a protein that preferentially binds to a protein receptor found in muscle cells. In some embodiments, a muscle-targeting peptide contains a high propensity of hydrophobic amino acids, e.g. valine, such that the peptide preferentially targets muscle cells. In some embodiments, a muscle-targeting peptide has not been previously characterized or disclosed. These peptides may be conceived of, produced, synthesized, and/or (e.g., and) derivatized using any of several methodologies, e.g. phage displayed peptide libraries, one-bead one-compound peptide libraries, or positional scanning synthetic peptide combinatorial libraries. Exemplary methodologies have been characterized in the art and are incorporated by reference (Gray, B. P. and Brown, K. C. “Combinatorial Peptide Libraries: Mining for Cell-Binding Peptides” Chem Rev. 2014, 114:2, 1020-1081.; Samoylova, T. I. and Smith, B. F. “Elucidation of muscle-binding peptides by phage display screening.” Muscle Nerve, 1999, 22:4. 460-6.). In some embodiments, a muscle-targeting peptide has been previously disclosed (see, e.g. Writer M. J. et al. “Targeted gene delivery to human airway epithelial cells with synthetic vectors incorporating novel targeting peptides selected by phage display.” J. Drug Targeting. 2004; 12:185; Cai, D. “BDNF-mediated enhancement of inflammation and injury in the aging heart.” Physiol Genomics. 2006, 24:3, 191-7.; Zhang, L. “Molecular profiling of heart endothelial cells.” Circulation, 2005, 112:11, 1601-11.; McGuire, M. J. et al. “In vitro selection of a peptide with high selectivity for cardiomyocytes in vivo.” J Mol Biol. 2004, 342:1, 171-82.). Exemplary muscle-targeting peptides comprise an amino acid sequence of the following group: CQAQGQLVC (SEQ ID NO: 141), CSERSMNFC (SEQ ID NO: 142), CPKTRRVPC (SEQ ID NO: 143), WLSEAGPVVTVRALRGTGSW (SEQ ID NO: 144), ASSLNIA (SEQ ID NO: 138), CMQHSMRVC (SEQ ID NO: 145), and DDTRHWG (SEQ ID NO: 146). In some embodiments, a muscle-targeting peptide may comprise about 2-25 amino acids, about 2-20 amino acids, about 2-15 amino acids, about 2-10 amino acids, or about 2-5 amino acids. Muscle-targeting peptides may comprise naturally-occurring amino acids, e.g. cysteine, alanine, or non-naturally-occurring or modified amino acids. Non-naturally occurring amino acids include 3-amino acids, homo-amino acids, proline derivatives, 3-substituted alanine derivatives, linear core amino acids, N-methyl amino acids, and others known in the art. In some embodiments, a muscle-targeting peptide may be linear; in other embodiments, a muscle-targeting peptide may be cyclic, e.g. bicyclic (see, e.g. Silvana, M. G. et al. Mol. Therapy, 2018, 26:1, 132-147.).

[0308] iii. Muscle-Targeting Receptor Ligands

[0309] A muscle-targeting agent may be a ligand, e.g. a ligand that binds to a receptor protein. A muscle-targeting ligand may be a protein, e.g. transferrin, which binds to an internalizing cell surface receptor expressed by a muscle cell. Accordingly, in some embodiments, the muscle-targeting agent is transferrin, or a derivative thereof that binds to a transferrin receptor. A muscle-targeting ligand may alternatively be a small molecule, e.g. a lipophilic small molecule that preferentially targets muscle cells relative to other cell types. Exemplary lipophilic small molecules that may target muscle cells include compounds comprising cholesterol, cholesteryl, stearic acid, palmitic acid, oleic acid, oleyl, linolene, linoleic acid, myristic acid, sterols, dihydrotestosterone, testosterone derivatives, glycerine, alkyl chains, trityl groups, and alkoxy acids.

[0310] iv. Muscle-Targeting Aptamers

[0311] A muscle-targeting agent may be an aptamer, e.g. an RNA aptamer, which preferentially targets muscle cells relative to other cell types. In some embodiments, a muscle-targeting aptamer has not been previously characterized or disclosed. These aptamers may be conceived of, produced, synthesized, and/or (e.g., and) derivatized using any of several methodologies, e.g. Systematic Evolution of Ligands by Exponential Enrichment. Exemplary methodologies have been characterized in the art and are incorporated by reference (Yan, A. C. and Levy, M. “Aptamers and aptamer targeted delivery” RNA biology, 2009, 6:3, 316-20.; Germer, K. et al. “RNA aptamers and their therapeutic and diagnostic applications.” Int. J. Biochem. Mol. Biol. 2013; 4: 27-40.). In some embodiments, a muscle-targeting aptamer has been previously disclosed (see, e.g. Phillippou, S. et al. “Selection and Identification of Skeletal-Muscle-Targeted RNA Aptamers.” Mol Ther Nucleic Acids. 2018, 10:199-214.; Thiel, W. H. et al. “Smooth Muscle Cell-targeted RNA Aptamer Inhibits Neointimal Formation.” Mol Ther. 2016, 24:4, 779-87.). Exemplary muscle-targeting aptamers include the A01B RNA aptamer and RNA Apt 14. In some embodiments, an aptamer is a nucleic acid-based aptamer, an oligonucleotide aptamer or a peptide aptamer. In some embodiments, an aptamer may be about 5-15 kDa, about 5-10 kDa, about 10-15 kDa, about 1-5 Da, about 1-3 kDa, or smaller.

[0312] v. Other Muscle-Targeting Agents

[0313] One strategy for targeting a muscle cell (e.g., a skeletal muscle cell) is to use a substrate of a muscle transporter protein, such as a transporter protein expressed on the sarcolemma. In some embodiments, the muscle-targeting agent is a substrate of an influx transporter that is specific to muscle tissue. In some embodiments, the influx transporter is specific to skeletal muscle tissue. Two main classes of transporters are expressed on the skeletal muscle sarcolemma, (1) the adenosine triphosphate (ATP) binding cassette (ABC) superfamily, which facilitate efflux from skeletal muscle tissue and (2) the solute carrier (SLC) superfamily, which can facilitate the influx of substrates into skeletal muscle. In some embodiments, the muscle-targeting agent is a substrate that binds to an ABC superfamily or an SLC superfamily of transporters. In some embodiments, the substrate that binds to the ABC or SLC superfamily of transporters is a naturally-occurring substrate. In some embodiments, the substrate that binds to the ABC or SLC superfamily of transporters is a non-naturally occurring substrate, for example, a synthetic derivative thereof that binds to the ABC or SLC superfamily of transporters.

[0314] In some embodiments, the muscle-targeting agent is a substrate of an SLC superfamily of transporters. SLC transporters are either equilibrative or use proton or sodium ion gradients created across the membrane to drive transport of substrates. Exemplary SLC transporters that have high skeletal muscle expression include, without limitation, the SATT transporter (ASCT1; SLC1A4), GLUT4 transporter (SLC2A4), GLUT7 transporter (GLUT7; SLC2A7), ATRC2 transporter (CAT-2; SLC7A2), LAT3 transporter (KIAA0245; SLC7A6), PHT1 transporter (PTR4; SLC15A4), OATP-J transporter (OATP5A1; SLC21A15), October3 transporter (EMT; SLC22A3), OCTN2 transporter (FLJ46769; SLC22A5), ENT transporters (ENT1; SLC29A1 and ENT2; SLC29A2), PAT2 transporter (SLC36A2), and SAT2 transporter (KIAA1382; SLC38A2). These transporters can facilitate the influx of substrates into skeletal muscle, providing opportunities for muscle targeting.

[0315] In some embodiments, the muscle-targeting agent is a substrate of an equilibrative nucleoside transporter 2 (ENT2) transporter. Relative to other transporters, ENT2 has one of the highest mRNA expressions in skeletal muscle. While human ENT2 (hENT2) is expressed in most body organs such as brain, heart, placenta, thymus, pancreas, prostate, and kidney, it is especially abundant in skeletal muscle. Human ENT2 facilitates the uptake of its substrates depending on their concentration gradient. ENT2 plays a role in maintaining nucleoside homeostasis by transporting a wide range of purine and pyrimidine nucleobases. The hENT2 transporter has a low affinity for all nucleosides (adenosine, guanosine, uridine, thymidine, and cytidine) except for inosine. Accordingly, in some embodiments, the muscle-targeting agent is an ENT2 substrate. Exemplary ENT2 substrates include, without limitation, inosine, 2′,3′-dideoxyinosine, and calofarabine. In some embodiments, any of the muscle-targeting agents provided herein are associated with a molecular payload (e.g., oligonucleotide payload). In some embodiments, the muscle-targeting agent is covalently linked to the molecular payload. In some embodiments, the muscle-targeting agent is non-covalently linked to the molecular payload.

[0316] In some embodiments, the muscle-targeting agent is a substrate of an organic cation/carnitine transporter (OCTN2), which is a sodium ion-dependent, high affinity carnitine transporter. In some embodiments, the muscle-targeting agent is carnitine, mildronate, acetylcarnitine, or any derivative thereof that binds to OCTN2. In some embodiments, the carnitine, mildronate, acetylcarnitine, or derivative thereof is covalently linked to the molecular payload (e.g., oligonucleotide payload).

[0317] A muscle-targeting agent may be a protein that is protein that exists in at least one soluble form that targets muscle cells. In some embodiments, a muscle-targeting protein may be hemojuvelin (also known as repulsive guidance molecule C or hemochromatosis type 2 protein), a protein involved in iron overload and homeostasis. In some embodiments, hemojuvelin may be full length or a fragment, or a mutant with at least 75%, at least 80%, at least 85%, at least 90%, at least 95%, at least 98% or at least 99% sequence identity to a functional hemojuvelin protein. In some embodiments, a hemojuvelin mutant may be a soluble fragment, may lack a N-terminal signaling, and/or (e.g., and) lack a C-terminal anchoring domain. In some embodiments, hemojuvelin may be annotated under GenBank RefSeq Accession Numbers NM_001316767.1, NM_145277.4, NM_202004.3, NM_213652.3, or NM_213653.3. It should be appreciated that a hemojuvelin may be of human, non-human primate, or rodent origin.

[0318] B. Molecular Payloads

[0319] Some aspects of the disclosure provide molecular payloads, e.g., for modulating a biological outcome, e.g., the transcription of a DNA sequence, the splicing and processing of a RNA sequence, the expression of a protein, or the activity of a protein. In some embodiments, a molecular payload is linked to, or otherwise associated with a muscle-targeting agent. In some embodiments, such molecular payloads are capable of targeting to a muscle cell, e.g., via specifically binding to a nucleic acid or protein in the muscle cell following delivery to the muscle cell by an associated muscle-targeting agent. It should be appreciated that various types of muscle-targeting agents may be used in accordance with the disclosure. For example, the molecular payload may comprise, or consist of, an oligonucleotide (e.g., antisense oligonucleotide), a peptide (e.g., a peptide that binds a nucleic acid or protein associated with disease in a muscle cell), a protein (e.g., a protein that binds a nucleic acid or protein associated with disease in a muscle cell), or a small molecule (e.g., a small molecule that modulates the function of a nucleic acid or protein associated with disease in a muscle cell). In some embodiments, the molecular payload is an oligonucleotide that comprises a strand having a region of complementarity to a mutated DMD allele. Exemplary molecular payloads are described in further detail herein, however, it should be appreciated that the exemplary molecular payloads provided herein are not meant to be limiting.

[0320] i. Oligonucleotides

[0321] Any suitable oligonucleotide may be used as a molecular payload, as described herein. In some embodiments, the oligonucleotide may be designed to induce exon skipping, e.g., EXONDYS 51 oligonucleotide (Sarepta Therapeutics, Inc.), which comprises SEQ ID NO: 343 (CUCCAACAUCAAGGAAGAUGGCAUUUCUAG); WVE-210201 (Wave Life Sciences), which comprises SEQ ID NO: 334 (UCAAGGAAGAUGGCAUUUCU); Casimersen (Sarepta Therapeutics, Inc.), which comprises SEQ ID NO: 302 (CAAUGCCAUCCUGGAGUUCCUG); or Golodirsen (Sarepta Therapeutics, Inc.), which comprises SEQ ID NO: 380 (GUUGCCUCCGGUUCUGAAGGUGUUC). In some embodiments, the oligonucleotide may be designed to induce exon skipping, e.g., viltolarsen (NS Pharma, Inc.), which comprises SEQ ID NO: 2257 (CCTCCGGTTCTGAAGGTGTTC) or renadirsen (Daiichi Sankyo Company), which comprises SEQ ID NO: 2252 (CGCUGCCCAAUGCCAUCC). In some embodiments, the oligonucleotide comprises a sequence or portion thereof (e.g., 10, 11, 12, 13, 14, 15, 16, 17, 18, 19, 20 or more consecutive nucleosides thereof) of a sequence provided in Table 10, and/or the oligonucleotide comprises a region of complementarity to a target sequence provided in Table 10. Any one or more of the thymine bases (T's) in any one of the oligonucleotides provided herein (e.g., the oligonucleotides listed in Table 10) may optionally be uracil bases (U's), and/or any one or more of the U's in the oligonucleotides provided herein may optionally be T's.

TABLE 10
Examples of oligonucleotide molecular payloads

| | SEQ | | SEQ | | SEQ | |
|---|---|---|---|---|---|---|
| | ID | Antisense | ID | Antisense | ID | Target |
| Name | NO: | Sequence^{†} | NO: | Sequence^{†} | NO: | Sequence^{†} |
| EXONDYS 51 | 343 | CUCCAACAUC | 745 | CTCCAACATC | 1550 | CTAGAAATGC |
| | | AAGGAAGAUG | | AAGGAAGATG | | CATCTTCCTTG |
| | | GCAUUUCUAG | | GCATTTCTAG | | ATGTTGGAG |
| WVE-210201 | 334 | UCAAGGAAGA | 2254 | TCAAGGAAGA | 2259 | AGAAATGCCA |
| | | UGGCAUUUCU | | TGGCATTTCT | | TCTTCCTTGA |
| Casimersen | 302 | CAAUGCCAUC | 2255 | CAATGCCATC | 2260 | CAGGAACTCC |
| | | CUGGAGUUCC | | CTGGAGTTCC | | AGGATGGCAT |
| | | UG | | TG | | TG |
| Golodirsen | 380 | GUUGCCUCCG | 2256 | GTTGCCTCCG | 2261 | GAACACCTTC |
| | | GUUCUGAAGG | | GTTCTGAAGG | | AGAACCGGAG |
| | | UGUUC | | TGTTC | | GCAAC |
| Viltolarsen | 2251 | CCUCCGGUUC | 2257 | CCTCCGGTTCT | 2262 | GAACACCTTC |
| | | UGAAGGUGUU | | GAAGGTGTTC | | AGAACCGGAG |
| | | C | | | | G |
| Renadirsen | 2252 | CGCUGCCCAA | 2258 | CGCTGCCCAA | 2263 | GGATGGCATT |
| | | UGCCAUCC | | TGCCATCC | | GGGCAGCG |

^{†}Each thymine base (T) in any one of the oligonucleotides and/or target sequences provided in Table 10 may independently and optionally be replaced with a uracil base (U), and/or each U may independently and optionally be replaced with a T. Target sequences listed in Table 10 contain Ts, but binding of a DMD-targeting oligonucleotide to RNA and/or DNA is contemplated.

[0322] In some embodiments, the oligonucleotide may be designed to cause degradation of an mRNA (e.g., the oligonucleotide may be a gapmer, an siRNA, a ribozyme or an aptamer that causes degradation). In some embodiments, the oligonucleotide may be designed to block translation of an mRNA (e.g., the oligonucleotide may be a mixmer, an siRNA or an aptamer that blocks translation). In some embodiments, an oligonucleotide may be designed to cause degradation and block translation of an mRNA. In some embodiments, the oligonucleotide may be designed to promote stability of an mRNA. In some embodiments, the oligonucleotide may be designed to promote translation of an mRNA. In some embodiments, an oligonucleotide may be designed to promote stability and promote translation of an mRNA. In some embodiments, an oligonucleotide may be a guide nucleic acid (e.g., guide RNA) for directing activity of an enzyme (e.g., a gene editing enzyme). In some embodiments, a guide nucleic acid may direct an enzyme to delete the entirety or a part of a mutated DMD allele (e.g., to facilitate in-frame exon skipping). In some embodiments, the oligonucleotide may be designed to target repressive regulators of DMD expression, e.g., miR-31. Other examples of oligonucleotides are provided herein. It should be appreciated that, in some embodiments, oligonucleotides in one format (e.g., antisense oligonucleotides) may be suitably adapted to another format (e.g., siRNA oligonucleotides) by incorporating functional sequences (e.g., antisense strand sequences) from one format to the other format.

[0323] Examples of oligonucleotides useful for targeting DMD are provided in U.S. Patent Application Publication US20100130591A1, published on May 27, 2010, entitled “MULTIPLE EXON SKIPPING COMPOSITIONS FOR DMD”; U.S. Pat. No. 8,361,979, issued Jan. 29, 2013, entitled “MEANS AND METHOD FOR INDUCING EXON-SKIPPING”; U.S. Patent Application Publication 20120059042, published Mar. 8, 2012, entitled “METHOD FOR EFFICIENT EXON (44) SKIPPING IN DUCHENNE MUSCULAR DYSTROPHY AND ASSOCIATED MEANS; U.S. Patent Application Publication 20140329881, published Nov. 6, 2014, entitled “EXON SKIPPING COMPOSITIONS FOR TREATING MUSCULAR DYSTROPHY”; U.S. Pat. No. 8,232,384, issued Jul. 31, 2012, entitled “ANTISENSE OLIGONUCLEOTIDES FOR INDUCING EXON SKIPPING AND METHODS OF USE THEREOF”; U.S. Patent Application Publication 20120022134A1, published Jan. 26, 2012, entitled “METHODS AND MEANS FOR EFFICIENT SKIPPING OF EXON 45 IN DUCHENNE MUSCULAR DYSTROPHY PRE-MRNA; U.S. Patent Application Publication 20120077860, published Mar. 29, 2012, entitled “ADENO-ASSOCIATED VIRAL VECTOR FOR EXON SKIPPING IN A GENE ENCODING A DISPENSABLE DOMAN PROTEIN”; U.S. Pat. No. 8,324,371, issued Dec. 4, 2012, entitled “OLIGOMERS”; U.S. Pat. No. 9,078,911, issued Jul. 14, 2015, entitled “ANTISENSE OLIGONUCLEOTIDES”; U.S. Pat. No. 9,079,934, issued Jul. 14, 2015, entitled “ANTISENSE NUCLEIC ACIDS”; U.S. Pat. No. 9,034,838, issued May 19, 2015, entitled “MIR-31 IN DUCHENNE MUSCULAR DYSTROPHY THERAPY”; and International Patent Publication WO2017062862A3, published Apr. 13, 2017, entitled “OLIGONUCLEOTIDE COMPOSITIONS AND METHODS THEREOF”; the contents of each of which are incorporated herein in their entireties.

[0324] Table 14 provides non-limiting examples of sequences of oligonucleotides that are useful for targeting DMD, e.g., for exon skipping. In some embodiments, an oligonucleotide may comprise any sequence provided in Table 14.

TABLE 14
Oligonucleotide sequences for targeting DMD.

| EXON | SEQ ID NO: | SEQUENCE |
|---|---|---|
| 8 | 151 | CUUCCUGGAUGGCUUCAAU |
| 8 | 152 | GUACAUUAAGAUGGACUUC |
| 8 | 153 | UAUCUGGAUAGGUGGUAUCAAGAUCUGUAA |
| 8 | 154 | AUGUAACUGAAAAUGUUCUUCUUUA |
| 8 | 155 | UGGAUAGGUGGUAUCAACAUCUGUAAGCAC |
| 8 | 156 | GAUAGGUGGUAUCAACAUCUGU |
| 8 | 157 | UAUCUGGAUAGGUGGUAUCAACAUCUGUAA |
| 8 | 158 | AAACUUGGAAGAGUGAUGUGAUGUA |
| 8 | 159 | GCUCACUUGUUGAGGCAAAACUUGGAA |
| 8 | 160 | GCCUUGGCAACAUUUCCACUUCCUG |
| 8 | 161 | UACACACUUUACCUGUUGAGAAUAG |
| 8 | 162 | GAUAGGUGGUAUCAACAUCUGUAA |
| 8 | 163 | GAUAGGUGGUAUCAACAUCUG |
| 8 | 164 | GAUAGGUGGUAUCAACAUCUGUAAG |
| 8 | 165 | GGUGGUAUCAACAUCUGUAA |
| 8 | 166 | GUAUCAACAUCUGUAAGCAC |
| 23 | 167 | CGGCUAAUUUCAGAGGGCGCUUUCUUNGAC |
| 23 | 168 | ACAGUGGUGCUGAGAUAGUAUAGGCC |
| 23 | 169 | UAGGCCACUUUGUUGCUCUUGC |
| 23 | 170 | UUCAGAGGGCGCUUUCUUC |
| 23 | 171 | GGCCAAACCUCGGCUUACCUGAAAU |
| 23 | 172 | GGCCAAACCUCGGCUUACCU |
| 35 | 173 | UCUUCAGGUGCACCUUCUGUUUCUCAAUCU |
| 35 | 174 | UCUGUGAUACUCUUCAGGUGCACCUUCUGU |
| 35 | 175 | UCUUCUGCUCGGGAGGUGACA |
| 35 | 176 | CCAGUUACUAUUCAGAAGAC |
| 35 | 177 | UCUUCAGGUGCACCUUCUGU |
| 43 | 178 | UGCUGCUGUCUUCUUGCU |
| 43 | 179 | UUGUUAACUUUUUCCCAUU |
| 43 | 180 | UGUUAACUUUUUCCCAUUGG |
| 43 | 181 | CAUUUUGUUAACUUUUUCCC |
| 43 | 182 | CUGUAGCUUCACCCUUUCC |
| 43 | 183 | GAGAGCUUCCUGUAGCUUCACCCUUU |
| 43 | 184 | UCCUGUAGCUUCACCCUUUCCACAGGCG |
| 43 | 185 | UGUGUUACCUACCCUUGUCG |
| 43 | 186 | UAGACUAUCUUUUAUAUUCUGUAAUAU |
| 43 | 187 | GAGAGCUUCCUGUAGCUUCACCCUUUCCA |
| 43 | 188 | UUCCUGUAGCUUCACCCUUUCCACAGGCGUU |
| 43 | 189 | AGCUUCCUGUAGCUUCACCCUUU |
| 43 | 190 | GGAGAGAGCUUCCUGUAGCUUCACCCUUU |
| 43 | 191 | GAGAGCUUCCUGUAGCUUCACCC |
| 43 | 192 | UAUGUGUUACCUACCCUUGUCGGUC |
| 43 | 193 | GGAGAGAGCUUCCUGUAGCU |
| 43 | 194 | UCACCCUUUCCACAGGCGUUGCA |
| 43 | 195 | GCUGGGAGAGAGCUUCCUGUAGCUUCAC |
| 43 | 196 | UGUUACCUACCCUUGUCGGUCCUUGUAC |
| 43 | 197 | CUGCUGUCUUCUUGCUAUGAAUAAUGUC |
| 43 | 198 | GGCGUUGCACUUUGCAAUGCUGCUGUCU |
| 43 | 199 | UUGGAAAUCAAGCUGGGAGAGAGCUUCC |
| 43 | 200 | CUACCCUUGUCGGUCCUUGUACAUUUUG |
| 43 | 201 | GUCAAUCCGACCUGAGCUUUGUUGUAGA |
| 43 | 202 | CUUGCUAUGAAUAAUGUCAAUCCGACC |
| 43 | 203 | UAUAUGUGUUACCUACCCUUGUCGGUCC |
| 43 | 204 | AAUCAGCUGGGAGAGAGCUUCCUGUAGCU |
| 43 | 205 | UCGUUCUUCUGUCGUCGUAACGUUUC |
| 44 | 206 | UUUGUGUCUUUCUGAGAAAC |
| 44 | 207 | AAAGACUUACCUUAAGAUAC |
| 44 | 208 | AUCUGUCAAAUCGCCUGCAG |
| 44 | 209 | CGCCGCCAUUUCUCAACAG |
| 44 | 210 | UUUGUAUUUAGCAUGUUCCC |
| 44 | 211 | CCGCCAUUUCUCAACAG |
| 44 | 212 | UUCUCAGGAAUUUGUGUCUUU |
| 44 | 213 | GACAACUCUUU |
| 44 | 214 | UCAGCUUCUGUUAGCCACUG |
| 44 | 215 | UGUUCAGCUUCUGUUAGCCACUGA |
| 44 | 216 | CUGUUCAGCUUCUGUUAGCCACUGAUU |
| 44 | 217 | UUCUCAACAGAUCUGUCAAAUCGCCUGCAG |
| 44 | 218 | GCCACUGAUUAAAUAUCUUUAUAUC |
| 44 | 219 | UCUGUUAGCCACUGAUUAAAUAUCUUUAUA |
| 44 | 220 | GAGAAACUGUUCAGCUUCUGUUAGCCACUGA |
| 44 | 221 | UCUUUCUGAGAAACUGUUCAGCUUCUGUUAG |
| 44 | 222 | CAGAUCUGUCAAAUCGCCUGCAGGUA |
| 44 | 223 | CAACAGAUCUGUCAAAUCGCCUGCAG |
| 44 | 224 | AAACUGUUCAGCUUCUGUUAGCCACUGAUUAAA |
| 44 | 225 | GAAACUGUUCAGCUUCUGUUAGCCACUGAUU |
| 44 | 226 | AAACUGUUCAGCUUCUGUUAGCCACUGA |
| 44 | 227 | UGAGAAACUGUUCAGCUUCUGUUAGCCA |
| 44 | 228 | UUCUGAGAAACUGUUCAGCUUCUGUUAGCCAC |
| 44 | 229 | UUCUGAGAAACUGUUCAGCUUCUGUU |
| 44 | 230 | GAUCUGUCAAAUCGCCUGCAGGUAA |
| 44 | 231 | AUAAUGAAAACGCCGCCAUUUCUCA |
| 44 | 232 | AAACUGUUCAGCUUCUGUUAGCCAC |
| 44 | 233 | UUGUGUCUUUCUGAGAAACUGUUCA |
| 44 | 234 | CCAAUUCUCAGGAAUUUGUGUCUUU |
| 44 | 235 | AUCGCCUGCAGGUAAAAGCAUAUGG |
| 44 | 236 | UGAAAACGCCGCCAUUUCUCAACAGAUCUG |
| 44 | 237 | CAUAAUGAAAACGCCGCCAUUUCUCAACAG |
| 44 | 238 | UGUUCAGCUUCUGUUAGCCACUGAUUAAAU |
| 44 | 239 | CAGAUCUGUCAAAUCGCCUGCAGG |
| 44 | 240 | CAACAGAUCUGUCAAAUCGCCUGCAGG |
| 44 | 241 | CUCAACAGAUCUGUCAAAUCGCCUGCAGG |
| 44 | 242 | GAUCUGUCAAAUCGCCUGCAGGU |
| 44 | 243 | GAUCUGUCAAAUCGCCUGCAGG |
| 44 | 244 | GAUCUGUCAAAUCGCCUGCAG |
| 44 | 245 | CAGAUCUGUCAAAUCGCCUGCAGGU |
| 44 | 246 | CAGAUCUGUCAAAUCGCCUGCAG |
| 44 | 247 | GUGUCUUUCUGAGAAACUGUUCAGC |
| 44 | 248 | GAGAAACUGUUCAGCUUCUGUUAGCCAC |
| 44 | 249 | GAAACUGUUCAGCUUCUGUUAGCCACUG |
| 44 | 250 | CUGUUCAGCUUCUGUUAGCCACUG |
| 44 | 251 | AUCUGUCAAAUCGCCUGCAGGUAAAAG |
| 44 | 252 | GAUCUGUCAAAUCGCCUGCAGGUAAAAGC |
| 44 | 253 | CACCGAUUGUCUUCGA |
| 44 | 254 | CCCUUGUACGAUUUAUG |
| 44 | 255 | UCUGUGUUUAAGGACUCU |
| 45 | 256 | GCUGAAUUAUUUCUUCCCC |
| 45 | 257 | UUUUUCUGUCUGACAGCUG |
| 45 | 258 | UCUGUUUUUGAGGAUUGC |
| 45 | 259 | CCACCGCAGAUUCAGGC |
| 45 | 260 | GCCCAAUGCCAUCCUGG |
| 45 | 261 | UUUGCAGACCUCCUGCC |
| 45 | 262 | CAGUUUGCCGCUGCCCA |
| 45 | 263 | GUUGCAUUCAAUGUUCUGAC |
| 45 | 264 | AUUUUUCCUGUAGAAUACUGG |
| 45 | 265 | GCUGCCCAAUGCGAUCCUGGAGUUCCUGUAAGAU |
| 45 | 266 | GCUGCCCAAUGCCAUCCUGGAGUUCCUG |
| 45 | 267 | GCUGCCCAAUGCCAUCCUGGAGUUCCUGUAA |
| 45 | 268 | CAAUGCCAUCCUGGAGUUCCUGUAAGAUACC |
| 45 | 269 | GCUGCCCAAUGCCAUCCUGGAGUUCCUGUAAG |
| 45 | 270 | CCAAUGCCAUCCUGGAGUUCCUGUAAGAUA |
| 45 | 271 | UUGCCGCUGCCCAAUGCCAUCCUGGAGUUCCUGUAAGAU |
| 45 | 272 | GCUGCCCAAUGCCAUCCUGGAGUUCCUGUAAGAU |
| 45 | 273 | CAAUGCCAUCCUGGAGUUCCUGUAAGA |
| 45 | 274 | CAGUUUGCCGCUGCCCAAUGCCAUCC |
| 45 | 275 | CUUCCCCAGUUGCAUUCAAUGUUC |
| 45 | 276 | CUGGCAUCUGUUUUUGAGGAUUG |
| 45 | 277 | UUAGAUCUGUCGCCCUACCU |
| 45 | 278 | GCUGCCCAAUGCCAUCCUGGAGUUCCUGUAAGAUACCAA |
| 45 | 279 | GCCCAAUGCCAUCCUGGAGUUCCUGUAAGAUACC |
| 45 | 280 | CAUCCUGGAGUUCCUGUAAGAUACC |
| 45 | 281 | UGCCAUCCUGGAGUUCCUGUAAGAUACC |
| 45 | 282 | UGCCAUCCUGGAGUUCCUGUAAGAU |
| 45 | 283 | CAAUGCCAUCCUGGAGUUCCUGUAAGAU |
| 45 | 284 | GCCCAAUGCCAUCCUGGAGUUCCUGUAAGAU |
| 45 | 285 | GCCCAAUGCCAUCCUGGAGUUCCUGUAA |
| 45 | 286 | GCCGCUGCCCAAUGACAUCCUGGAGUUCCUGUAA |
| 45 | 287 | GCCAUCCUGGAGUUCCUGUAAGAUA |
| 45 | 288 | CCAAUGCCAUCCUGGAGUUCCUGUA |
| 45 | 289 | CUGACAACAGUUUGCCGCUGCCCAA |
| 45 | 290 | UUUGAGGAUUGCUGAAUUAUUUCUU |
| 45 | 291 | CAGUUUGCCGCUGCCCAAUGCCAUCCUGGA |
| 45 | 292 | UUGCCGCUGCCCAAUGCCAUCCUGGAGUUC |
| 45 | 293 | UUUGCCGCUGCCCAAUGCCAUCCUG |
| 45 | 294 | CCAAUGCCAUCCUGGAGUUCCU |
| 45 | 295 | CCCAAUGCCAUCCUGGAGUUCCUGUAAGA |
| 45 | 296 | CCGCUGCCCAAUGCCAUCCUGGAGUUCC |
| 45 | 297 | CCCAAUGCCAUCCUGGAGUUCCUGUAAGAU |
| 45 | 298 | CCGCUGCCCAAUGCCAUCCUGGAGUUCCUG |
| 45 | 299 | UGCCCAAUGCCAUCCUGGAGUUCCUGUAAG |
| 45 | 300 | CCCAAUGCCAUCCUGGAGUUCCUGUAAG |
| 45 | 301 | UGCCCAAUGCCAUCCUGGAGUUCCUGUA |
| 45 | 302 | CAAUGCCAUCCUGGAGUUCCUG |
| 45 | 303 | GCCGCUGCCCAAUGCCAUCCUGGAGUUCCUG |
| 45 | 304 | AUUAGAUCUGUCGCCCUACCUCUUUUUUC |
| 45 | 305 | UGUCGCCCUACCUCUUUUUUCUGUCUG |
| 45 | 306 | GCCCAAUGCCAUCCUGGAGUUCCUG |
| 55 | 307 | AGCCUCUCGCUCACUCACCCUGCAAAGGA |
| 50 | 308 | CCACUCAGAGCUCAGAUCUUCUAACUUCC |
| 50 | 309 | CUUCCACUCAGAGCUCAGAUCUUCUAA |
| 50 | 310 | GGGAUCCAGUAUACUUACAGGCUCC |
| 50 | 311 | CUCAGAGCUCAGAUCUU |
| 50 | 312 | GGCUGCUUUGCCCUC |
| 50 | 313 | CUCAGAUCUUCUAACUUCCUCUUUAAC |
| 50 | 314 | CUCAGAGCUCAGAUCUUCUAACUUCCUCU |
| 50 | 315 | CGCCUUCCACUCAGAGCUCAGAUCUUC |
| 50 | 316 | UCAGCUCUUGAAGUAAACGGUUUACCG |
| 50 | 317 | UUUGCCCUCAGCUCUUGAAGUAAACGG |
| 50 | 318 | GGCUGCUUUGCCCUCAGCUCUUGAAGU |
| 50 | 319 | CAGGAGCUAGGUCAGGCUGCUUUGCC |
| 50 | 320 | UCCAAUAGUGGUCAGUCCAGGAGCU |
| 50 | 321 | AAAGAGAAUGGGAUCCAGUAUACUUAC |
| 50 | 322 | AAAUAGCUAGAGCCAAAGAGAAUGGGA |
| 50 | 323 | GGCUGCUUUGCCCUCAGCUCUUGAAGUAAACGG |
| 50 | 324 | AGGCUGCUUUGCCCUCAGCUCUUGAAGUAA |
| 50 | 325 | GUCAGGCUGCUUUGCCCUCAGCUCUUGAAG |
| 50 | 326 | AGGUCAGGCUGCUUUGCCCUCAGCUCUUGA |
| 50 | 327 | CAGAGCUCAGAUCUUCUAACUUCCU |
| 50 | 328 | CUUACAGGCUCCAAUAGUGGUCAGU |
| 50 | 329 | AUGGGAUCCAGUAUACUUACAGGCU |
| 50 | 330 | AGAGAAUGGGAUCCAGUAUACUUAC |
| 50 | 331 | AACUUCCUCUUUAACAGAAAAGCAUAC |
| 50 | 332 | GAGCCUCUCGCUCACUCACCCUGCAAAGGA |
| 51 | 333 | CUCAUACCUUCUGCUUGAUGAUC |
| 51 | 334 | UCAAGGAAGAUGGCAUUUCU |
| 51 | 335 | GAAAGCCAGUCGGUAAGUUC |
| 51 | 336 | CACCCACCAUCACCC |
| 51 | 337 | CCUCUGUGAUUUUAUAACUUGAU |
| 51 | 338 | UGAUAUCCUCAAGGUCACCC |
| 51 | 339 | GGUACCUCCAACAUCAAGGAAGAUGGCAUU |
| 51 | 340 | AUUUCUAGUUUGGAGAUGGCAGUUUC |
| 51 | 341 | CAUCAAGGAAGAUGGCAUUUCUAGUU |
| 51 | 342 | GAGCAGGUACCUCCAACAUCAAGGAA |
| 51 | 343 | CUCCAACAUCAAGGAAGAUGGCAUUUCUAG |
| 51 | 344 | ACCAGAGUAACAGUCUGAGUAGGAG |
| 51 | 345 | CACCAGAGUAACAGUCUGAGUAGGA |
| 51 | 346 | UCACCAGAGUAACAGUCUGAGUAGG |
| 51 | 347 | GUCACCAGAGUAACAGUCUGAGUAG |
| 51 | 348 | ACCAGAGUAACAGUCUGAGUAGGAGC |
| 51 | 349 | UUCUGUCCAAGCCCGGUUGAAAUC |
| 51 | 350 | ACAUCAAGGAAGAUGGCAUUUCUAGUUUGG |
| 51 | 351 | ACAUCAAGGAAGAUGGCAUUUCUAG |
| 51 | 352 | AUCAUUUUUUCUCAUACCUUCUGCU |
| 51 | 353 | CACCCACCAUCACCCUCUGUG |
| 51 | 354 | AUCAUCUCGUUGAUAUCCUCAA |
| 51 | 355 | CUCCAACAUCAAGGAAGAUGGCAUUUCU |
| 51 | 356 | CAUCAAGGAAGAUGGCAUUUCUAGU |
| 51 | 357 | AUCAUUUUUUCUCAUACCUUCUGCUAGGAGCUAAAA |
| 52 | 358 | UUGCUGGUCUUGUUUUUC |
| 52 | 359 | CCGUAAUGAUUGUUCU |
| 52 | 360 | GCUGGUCUUGUUUUUCAA |
| 52 | 361 | UGGUCUUGUUUUUCAAAUUU |
| 52 | 362 | GUCUUGUUUUUCAAAUUUUG |
| 52 | 363 | CUUGUUUUUCAAAUUUUGGG |
| 52 | 364 | UGUUUUUCAAAUUUUGGGC |
| 52 | 365 | UCCAACUGGGGACGCCUCUGUUCCAAAUCCUGC |
| 52 | 366 | UCCUGCAUUGUUGCCUGUAAG |
| 52 | 367 | UCCAACUGGGGACGCCUCUGUUCCAAAUCC |
| 52 | 368 | ACUGGGGACGCCUCUGUUCCA |
| 52 | 369 | CCGUAAUGAUUGUUCUAGCC |
| 52 | 370 | UGUUAAAAAACUUACUUCGA |
| 53 | 371 | CUGUUGCCUCCGGUUCUG |
| 53 | 372 | UUGGCUCUGGCCUGUCCU |
| 53 | 373 | UUCAACUGUUGCCUCCGGUUCUGAAGGUGUUCU |
| 53 | 374 | UACUUCAUCCCACUGAUUCUGAAUU |
| 53 | 375 | CUGAAGGUGUUCUUGUACUUCAUCC |
| 53 | 376 | CUGUUGCCUCCGGUUCUGAAGGUGU |
| 53 | 377 | CUGUUGCCUCCGGUUCUGAAGGUGUUCUUG |
| 53 | 378 | CAACUGUUGCCUCCGGUUCUGAAGGUGUUC |
| 53 | 379 | UUGCCUCCGGUUCUGAAGGUGUUCUUGUAC |
| 53 | 380 | GUUGCCUCCGGUUCUGAAGGUGUUC |
| 53 | 381 | CUCCGGUUCUGAAGGUGUUCUUG |
| 53 | 382 | CUCCGGUUCUGAAGGUGUUCUU |
| 53 | 383 | CUCCGGUUCUGAAGGUGUUCU |
| 53 | 384 | CUCCGGUUCUGAAGGUGUUC |
| 53 | 385 | CUCCGGUUCUGAAGGUGUU |
| 53 | 386 | CAUUCAACUGUUGCCUCCGGUUCUG |
| 53 | 387 | CUGUUGCCUCCGGUUCUGAAGGUG |
| 53 | 388 | CAUUCAACUGUUGCCUCCGGUUCUGAAGGUG |
| 53 | 389 | UACUAACCUUGGUUUCUGUGA |
| 53 | 390 | UGUAUAGGGACCCUCCUUCCAUGACUC |
| 53 | 391 | CUAACCUUGGUUUCUGUGAUUUUCU |
| 53 | 392 | GGUAUCUUUGAUACUAACCUUGGUUUC |
| 53 | 393 | AUUCUUUCAACUAGAAUAAAAG |
| 53 | 394 | GAUUCUGAAUUCUUUCAACUAGAAU |
| 53 | 395 | AUCCCACUGAUUCUGAAUUC |
| 53 | 396 | AACCGAGACCGGACAGGAUUCU |
| 53 | 397 | GGAAGCUAAGGAAGAAGCUGAGCAGG |
| 55 | 398 | CUGUUGCAGUAAUCUAUGAG |
| 55 | 399 | UGCCAUUGUUUCAUCAGCUCUUU |
| 55 | 400 | UGCAGUAAUCUAUGAGUUUC |
| 55 | 401 | UCCUGUAGGACAUUGGCAGU |
| 55 | 131 | GAGUCUUCUAGGAGCCUU |

[0325] In some embodiments, an oligonucleotide useful for targeting DMD (e.g., for exon skipping) targets a region of a DMD RNA (e.g., the Dp427m transcript of SEQ ID NO: 2239). In some embodiments, an oligonucleotide useful for targeting DMD (e.g., for exon skipping) comprises a region of complementarity to a DMD RNA (e.g., the Dp427m transcript of SEQ ID NO: 2239). In some embodiments, an oligonucleotide useful for targeting DMD (e.g., for exon skipping) comprises a region of complementarity to an exon of a DMD RNA (e.g., any one of SEQ ID NOs: 2240-2250). Examples of DMD RNA sequences and exon sequences are provided below.

Homo sapiens dystrophin (DMD), transcript variant Dp427m, mRNA (NCBI
Reference Sequence: NM_004006.2)
(SEQ ID NO: 2239)
TCCTGGCATCAGTTACTGTGTTGACTCACTCAGTGTTGGGATCACTCACTTTCCCCCTACAGGACTCA
GATCTGGGAGGCAATTACCTTCGGAGAAAAACGAATAGGAAAAACTGAAGTGTTACTTTTTTTAAA
GCTGCTGAAGTTTGTTGGTTTCTCATTGTTTTTAAGCCTACTGGAGCAATAAAGTTTGAAGAACTTTT
ACCAGGTTTTTTTTATCGCTGCCTTGATATACACTTTTCAAAATGCTTTGGTGGGAAGAAGTAGAGG
ACTGTTATGAAAGAGAAGATGTTCAAAAGAAAACATTCACAAAATGGGTAAATGCACAATTTTCTA
AGTTTGGGAAGCAGCATATTGAGAACCTCTTCAGTGACCTACAGGATGGGAGGCGCCTCCTAGACCT
CCTCGAAGGCCTGACAGGGCAAAAACTGCCAAAAGAAAAAGGATCCACAAGAGTTCATGCCCTGAA
CAATGTCAACAAGGCACTGCGGGTTTTGCAGAACAATAATGTTGATTTAGTGAATATTGGAAGTACT
GACATCGTAGATGGAAATCATAAACTGACTCTTGGTTTGATTTGGAATATAATCCTCCACTGGCAGG
TCAAAAATGTAATGAAAAATATCATGGCTGGATTGCAACAAACCAACAGTGAAAAGATTCTCCTGA
GCTGGGTCCGACAATCAACTCGTAATTATCCACAGGTTAATGTAATCAACTTCACCACCAGCTGGTC
TGATGGCCTGGCTTTGAATGCTCTCATCCATAGTCATAGGCCAGACCTATTTGACTGGAATAGTGTG
GTTTGCCAGCAGTCAGCCACACAACGACTGGAACATGCATTCAACATCGCCAGATATCAATTAGGC
ATAGAGAAACTACTCGATCCTGAAGATGTTGATACCACCTATCCAGATAAGAAGTCCATCTTAATGT
ACATCACATCACTCTTCCAAGTTTTGCCTCAACAAGTGAGCATTGAAGCCATCCAGGAAGTGGAAAT
GTTGCCAAGGCCACCTAAAGTGACTAAAGAAGAACATTTTCAGTTACATCATCAAATGCACTATTCT
CAACAGATCACGGTCAGTCTAGCACAGGGATATGAGAGAACTTCTTCCCCTAAGCCTCGATTCAAGA
GCTATGCCTACACACAGGCTGCTTATGTCACCACCTCTGACCCTACACGGAGCCCATTTCCTTCACA
GCATTTGGAAGCTCCTGAAGACAAGTCATTTGGCAGTTCATTGATGGAGAGTGAAGTAAACCTGGA
CCGTTATCAAACAGCTTTAGAAGAAGTATTATCGTGGCTTCTTTCTGCTGAGGACACATTGCAAGCA
CAAGGAGAGATTTCTAATGATGTGGAAGTGGTGAAAGACCAGTTTCATACTCATGAGGGGTACATG
ATGGATTTGACAGCCCATCAGGGCCGGGTTGGTAATATTCTACAATTGGGAAGTAAGCTGATTGGAA
CAGGAAAATTATCAGAAGATGAAGAAACTGAAGTACAAGAGCAGATGAATCTCCTAAATTCAAGAT
GGGAATGCCTCAGGGTAGCTAGCATGGAAAAACAAAGCAATTTACATAGAGTTTTAATGGATCTCC
AGAATCAGAAACTGAAAGAGTTGAATGACTGGCTAACAAAAACAGAAGAAAGAACAAGGAAAATG
GAGGAAGAGCCTCTTGGACCTGATCTTGAAGACCTAAAACGCCAAGTACAACAACATAAGGTGCTT
CAAGAAGATCTAGAACAAGAACAAGTCAGGGTCAATTCTCTCACTCACATGGTGGTGGTAGTTGAT
GAATCTAGTGGAGATCACGCAACTGCTGCTTTGGAAGAACAACTTAAGGTATTGGGAGATCGATGG
GCAAACATCTGTAGATGGACAGAAGACCGCTGGGTTCTTTTACAAGACATCCTTCTCAAATGGCAAC
GTCTTACTGAAGAACAGTGCCTTTTTAGTGCATGGCTTTCAGAAAAAGAAGATGCAGTGAACAAGAT
TCACACAACTGGCTTTAAAGATCAAAATGAAATGTTATCAAGTCTTCAAAAACTGGCCGTTTTAAAA
GCGGATCTAGAAAAGAAAAAGCAATCCATGGGCAAACTGTATTCACTCAAACAAGATCTTCTTTCA
ACACTGAAGAATAAGTCAGTGACCCAGAAGACGGAAGCATGGCTGGATAACTTTGCCCGGTGTTGG
GATAATTTAGTCCAAAAACTTGAAAAGAGTACAGCACAGATTTCACAGGCTGTCACCACCACTCAG
CCATCACTAACACAGACAACTGTAATGGAAACAGTAACTACGGTGACCACAAGGGAACAGATCCTG
GTAAAGCATGCTCAAGAGGAACTTCCACCACCACCTCCCCAAAAGAAGAGGCAGATTACTGTGGAT
TCTGAAATTAGGAAAAGGTTGGATGTTGATATAACTGAACTTCACAGCTGGATTACTCGCTCAGAAG
CTGTGTTGCAGAGTCCTGAATTTGCAATCTTTCGGAAGGAAGGCAACTTCTCAGACTTAAAAGAAAA
AGTCAATGCCATAGAGCGAGAAAAAGCTGAGAAGTTCAGAAAACTGCAAGATGCCAGCAGATCAG
CTCAGGCCCTGGTGGAACAGATGGTGAATGAGGGTGTTAATGCAGATAGCATCAAACAAGCCTCAG
AACAACTGAACAGCCGGTGGATCGAATTCTGCCAGTTGCTAAGTGAGAGACTTAACTGGCTGGAGT
ATCAGAACAACATCATCGCTTTCTATAATCAGCTACAACAATTGGAGCAGATGACAACTACTGCTGA
AAACTGGTTGAAAATCCAACCCACCACCCCATCAGAGCCAACAGCAATTAAAAGTCAGTTAAAAAT
TTGTAAGGATGAAGTCAACCGGCTATCAGGTCTTCAACCTCAAATTGAACGATTAAAAATTCAAAGC
ATAGCCCTGAAAGAGAAAGGACAAGGACCCATGTTCCTGGATGCAGACTTTGTGGCCTTTACAAAT
CATTTTAAGCAAGTCTTTTCTGATGTGCAGGCCAGAGAGAAAGAGCTACAGACAATTTTTGACACTT
TGCCACCAATGCGCTATCAGGAGACCATGAGTGCCATCAGGACATGGGTCCAGCAGTCAGAAACCA
AACTCTCCATACCTCAACTTAGTGTCACCGACTATGAAATCATGGAGCAGAGACTCGGGGAATTGCA
GGCTTTACAAAGTTCTCTGCAAGAGCAACAAAGTGGCCTATACTATCTCAGCACCACTGTGAAAGAG
ATGTCGAAGAAAGCGCCCTCTGAAATTAGCCGGAAATATCAATCAGAATTTGAAGAAATTGAGGGA
CGCTGGAAGAAGCTCTCCTCCCAGCTGGTTGAGCATTGTCAAAAGCTAGAGGAGCAAATGAATAAA
CTCCGAAAAATTCAGAATCACATACAAACCCTGAAGAAATGGATGGCTGAAGTTGATGTTTTTCTGA
AGGAGGAATGGCCTGCCCTTGGGGATTCAGAAATTCTAAAAAAGCAGCTGAAACAGTGCAGACTTT
TAGTCAGTGATATTCAGACAATTCAGCCCAGTCTAAACAGTGTCAATGAAGGTGGGCAGAAGATAA
AGAATGAAGCAGAGCCAGAGTTTGCTTCGAGACTTGAGACAGAACTCAAAGAACTTAACACTCAGT
GGGATCACATGTGCCAACAGGTCTATGCCAGAAAGGAGGCCTTGAAGGGAGGTTTGGAGAAAACTG
TAAGCCTCCAGAAAGATCTATCAGAGATGCACGAATGGATGACACAAGCTGAAGAAGAGTATCTTG
AGAGAGATTTTGAATATAAAACTCCAGATGAATTACAGAAAGCAGTTGAAGAGATGAAGAGAGCTA
AAGAAGAGGCCCAACAAAAAGAAGCGAAAGTGAAACTCCTTACTGAGTCTGTAAATAGTGTCATAG
CTCAAGCTCCACCTGTAGCACAAGAGGCCTTAAAAAAGGAACTTGAAACTCTAACCACCAACTACC
AGTGGCTCTGCACTAGGCTGAATGGGAAATGCAAGACTTTGGAAGAAGTTTGGGCATGTTGGCATG
AGTTATTGTCATACTTGGAGAAAGCAAACAAGTGGCTAAATGAAGTAGAATTTAAACTTAAAACCA
CTGAAAACATTCCTGGCGGAGCTGAGGAAATCTCTGAGGTGCTAGATTCACTTGAAAATTTGATGCG
ACATTCAGAGGATAACCCAAATCAGATTCGCATATTGGCACAGACCCTAACAGATGGCGGAGTCAT
GGATGAGCTAATCAATGAGGAACTTGAGACATTTAATTCTCGTTGGAGGGAACTACATGAAGAGGC
TGTAAGGAGGCAAAAGTTGCTTGAACAGAGCATCCAGTCTGCCCAGGAGACTGAAAAATCCTTACA
CTTAATCCAGGAGTCCCTCACATTCATTGACAAGCAGTTGGCAGCTTATATTGCAGACAAGGTGGAC
GCAGCTCAAATGCCTCAGGAAGCCCAGAAAATCCAATCTGATTTGACAAGTCATGAGATCAGTTTA
GAAGAAATGAAGAAACATAATCAGGGGAAGGAGGCTGCCCAAAGAGTCCTGTCTCAGATTGATGTT
GCACAGAAAAAATTACAAGATGTCTCCATGAAGTTTCGATTATTCCAGAAACCAGCCAATTTTGAGC
AGCGTCTACAAGAAAGTAAGATGATTTTAGATGAAGTGAAGATGCACTTGCCTGCATTGGAAACAA
AGAGTGTGGAACAGGAAGTAGTACAGTCACAGCTAAATCATTGTGTGAACTTGTATAAAAGTCTGA
GTGAAGTGAAGTCTGAAGTGGAAATGGTGATAAAGACTGGACGTCAGATTGTACAGAAAAAGCAG
ACGGAAAATCCCAAAGAACTTGATGAAAGAGTAACAGCTTTGAAATTGCATTATAATGAGCTGGGA
GCAAAGGTAACAGAAAGAAAGCAACAGTTGGAGAAATGCTTGAAATTGTCCCGTAAGATGCGAAA
GGAAATGAATGTCTTGACAGAATGGCTGGCAGCTACAGATATGGAATTGACAAAGAGATCAGCAGT
TGAAGGAATGCCTAGTAATTTGGATTCTGAAGTTGCCTGGGGAAAGGCTACTCAAAAAGAGATTGA
GAAACAGAAGGTGCACCTGAAGAGTATCACAGAGGTAGGAGAGGCCTTGAAAACAGTTTTGGGCA
AGAAGGAGACGTTGGTGGAAGATAAACTCAGTCTTCTGAATAGTAACTGGATAGCTGTCACCTCCC
GAGCAGAAGAGTGGTTAAATCTTTTGTTGGAATACCAGAAACACATGGAAACTTTTGACCAGAATG
TGGACCACATCACAAAGTGGATCATTCAGGCTGACACACTTTTGGATGAATCAGAGAAAAAGAAAC
CCCAGCAAAAAGAAGACGTGCTTAAGCGTTTAAAGGCAGAACTGAATGACATACGCCCAAAGGTGG
ACTCTACACGTGACCAAGCAGCAAACTTGATGGCAAACCGCGGTGACCACTGCAGGAAATTAGTAG
AGCCCCAAATCTCAGAGCTCAACCATCGATTTGCAGCCATTTCACACAGAATTAAGACTGGAAAGG
CCTCCATTCCTTTGAAGGAATTGGAGCAGTTTAACTCAGATATACAAAAATTGCTTGAACCACTGGA
GGCTGAAATTCAGCAGGGGGTGAATCTGAAAGAGGAAGACTTCAATAAAGATATGAATGAAGACA
ATGAGGGTACTGTAAAAGAATTGTTGCAAAGAGGAGACAACTTACAACAAAGAATCACAGATGAG
AGAAAGCGAGAGGAAATAAAGATAAAACAGCAGCTGTTACAGACAAAACATAATGCTCTCAAGGA
TTTGAGGTCTCAAAGAAGAAAAAAGGCTCTAGAAATTTCTCATCAGTGGTATCAGTACAAGAGGCA
GGCTGATGATCTCCTGAAATGCTTGGATGACATTGAAAAAAAATTAGCCAGCCTACCTGAGCCCAG
AGATGAAAGGAAAATAAAGGAAATTGATCGGGAATTGCAGAAGAAGAAAGAGGAGCTGAATGCAG
TGCGTAGGCAAGCTGAGGGCTTGTCTGAGGATGGGGCCGCAATGGCAGTGGAGCCAACTCAGATCC
AGCTCAGCAAGCGCTGGCGGGAAATTGAGAGCAAATTTGCTCAGTTTCGAAGACTCAACTTTGCAC
AAATTCACACTGTCCGTGAAGAAACGATGATGGTGATGACTGAAGACATGCCTTTGGAAATTTCTTA
TGTGCCTTCTACTTATTTGACTGAAATCACTCATGTCTCACAAGCCCTATTAGAAGTGGAACAACTTC
TCAATGCTCCTGACCTCTGTGCTAAGGACTTTGAAGATCTCTTTAAGCAAGAGGAGTCTCTGAAGAA
TATAAAAGATAGTCTACAACAAAGCTCAGGTCGGATTGACATTATTCATAGCAAGAAGACAGCAGC
ATTGCAAAGTGCAACGCCTGTGGAAAGGGTGAAGCTACAGGAAGCTCTCTCCCAGCTTGATTTCCAA
TGGGAAAAAGTTAACAAAATGTACAAGGACCGACAAGGGCGATTTGACAGATCTGTTGAGAAATGG
CGGCGTTTTCATTATGATATAAAGATATTTAATCAGTGGCTAACAGAAGCTGAACAGTTTCTCAGAA
AGACACAAATTCCTGAGAATTGGGAACATGCTAAATACAAATGGTATCTTAAGGAACTCCAGGATG
GCATTGGGCAGCGGCAAACTGTTGTCAGAACATTGAATGCAACTGGGGAAGAAATAATTCAGCAAT
CCTCAAAAACAGATGCCAGTATTCTACAGGAAAAATTGGGAAGCCTGAATCTGCGGTGGCAGGAGG
TCTGCAAACAGCTGTCAGACAGAAAAAAGAGGCTAGAAGAACAAAAGAATATCTTGTCAGAATTTC
AAAGAGATTTAAATGAATTTGTTTTATGGTTGGAGGAAGCAGATAACATTGCTAGTATCCCACTTGA
ACCTGGAAAAGAGCAGCAACTAAAAGAAAAGCTTGAGCAAGTCAAGTTACTGGTGGAAGAGTTGCC
CCTGCGCCAGGGAATTCTCAAACAATTAAATGAAACTGGAGGACCCGTGCTTGTAAGTGCTCCCATA
AGCCCAGAAGAGCAAGATAAACTTGAAAATAAGCTCAAGCAGACAAATCTCCAGTGGATAAAGGTT
TCCAGAGCTTTACCTGAGAAACAAGGAGAAATTGAAGCTCAAATAAAAGACCTTGGGCAGCTTGAA
AAAAAGCTTGAAGACCTTGAAGAGCAGTTAAATCATCTGCTGCTGTGGTTATCTCCTATTAGGAATC
AGTTGGAAATTTATAACCAACCAAACCAAGAAGGACCATTTGACGTTCAGGAAACTGAAATAGCAG
TTCAAGCTAAACAACCGGATGTGGAAGAGATTTTGTCTAAAGGGCAGCATTTGTACAAGGAAAAAC
CAGCCACTCAGCCAGTGAAGAGGAAGTTAGAAGATCTGAGCTCTGAGTGGAAGGCGGTAAACCGTT
TACTTCAAGAGCTGAGGGCAAAGCAGCCTGACCTAGCTCCTGGACTGACCACTATTGGAGCCTCTCC
TACTCAGACTGTTACTCTGGTGACACAACCTGTGGTTACTAAGGAAACTGCCATCTCCAAACTAGAA
ATGCCATCTTCCTTGATGTTGGAGGTACCTGCTCTGGCAGATTTCAACCGGGCTTGGACAGAACTTA
CCGACTGGCTTTCTCTGCTTGATCAAGTTATAAAATCACAGAGGGTGATGGTGGGTGACCTTGAGGA
TATCAACGAGATGATCATCAAGCAGAAGGCAACAATGCAGGATTTGGAACAGAGGCGTCCCCAGTT
GGAAGAACTCATTACCGCTGCCCAAAATTTGAAAAACAAGACCAGCAATCAAGAGGCTAGAACAAT
CATTACGGATCGAATTGAAAGAATTCAGAATCAGTGGGATGAAGTACAAGAACACCTTCAGAACCG
GAGGCAACAGTTGAATGAAATGTTAAAGGATTCAACACAATGGCTGGAAGCTAAGGAAGAAGCTG
AGCAGGTCTTAGGACAGGCCAGAGCCAAGCTTGAGTCATGGAAGGAGGGTCCCTATACAGTAGATG
CAATCCAAAAGAAAATCACAGAAACCAAGCAGTTGGCCAAAGACCTCCGCCAGTGGCAGACAAAT
GTAGATGTGGCAAATGACTTGGCCCTGAAACTTCTCCGGGATTATTCTGCAGATGATACCAGAAAAG
TCCACATGATAACAGAGAATATCAATGCCTCTTGGAGAAGCATTCATAAAAGGGTGAGTGAGCGAG
AGGCTGCTTTGGAAGAAACTCATAGATTACTGCAACAGTTCCCCCTGGACCTGGAAAAGTTTCTTGC
CTGGCTTACAGAAGCTGAAACAACTGCCAATGTCCTACAGGATGCTACCCGTAAGGAAAGGCTCCT
AGAAGACTCCAAGGGAGTAAAAGAGCTGATGAAACAATGGCAAGACCTCCAAGGTGAAATTGAAG
CTCACACAGATGTTTATCACAACCTGGATGAAAACAGCCAAAAAATCCTGAGATCCCTGGAAGGTT
CCGATGATGCAGTCCTGTTACAAAGACGTTTGGATAACATGAACTTCAAGTGGAGTGAACTTCGGAA
AAAGTCTCTCAACATTAGGTCCCATTTGGAAGCCAGTTCTGACCAGTGGAAGCGTCTGCACCTTTCT
CTGCAGGAACTTCTGGTGTGGCTACAGCTGAAAGATGATGAATTAAGCCGGCAGGCACCTATTGGA
GGCGACTTTCCAGCAGTTCAGAAGCAGAACGATGTACATAGGGCCTTCAAGAGGGAATTGAAAACT
AAAGAACCTGTAATCATGAGTACTCTTGAGACTGTACGAATATTTCTGACAGAGCAGCCTTTGGAAG
GACTAGAGAAACTCTACCAGGAGCCCAGAGAGCTGCCTCCTGAGGAGAGAGCCCAGAATGTCACTC
GGCTTCTACGAAAGCAGGCTGAGGAGGTCAATACTGAGTGGGAAAAATTGAACCTGCACTCCGCTG
ACTGGCAGAGAAAAATAGATGAGACCCTTGAAAGACTCCAGGAACTTCAAGAGGCCACGGATGAG
CTGGACCTCAAGCTGCGCCAAGCTGAGGTGATCAAGGGATCCTGGCAGCCCGTGGGCGATCTCCTC
ATTGACTCTCTCCAAGATCACCTCGAGAAAGTCAAGGCACTTCGAGGAGAAATTGCGCCTCTGAAA
GAGAACGTGAGCCACGTCAATGACCTTGCTCGCCAGCTTACCACTTTGGGCATTCAGCTCTCACCGT
ATAACCTCAGCACTCTGGAAGACCTGAACACCAGATGGAAGCTTCTGCAGGTGGCCGTCGAGGACC
GAGTCAGGCAGCTGCATGAAGCCCACAGGGACTTTGGTCCAGCATCTCAGCACTTTCTTTCCACGTC
TGTCCAGGGTCCCTGGGAGAGAGCCATCTCGCCAAACAAAGTGCCCTACTATATCAACCACGAGAC
TCAAACAACTTGCTGGGACCATCCCAAAATGACAGAGCTCTACCAGTCTTTAGCTGACCTGAATAAT
GTCAGATTCTCAGCTTATAGGACTGCCATGAAACTCCGAAGACTGCAGAAGGCCCTTTGCTTGGATC
TCTTGAGCCTGTCAGCTGCATGTGATGCCTTGGACCAGCACAACCTCAAGCAAAATGACCAGCCCAT
GGATATCCTGCAGATTATTAATTGTTTGACCACTATTTATGACCGCCTGGAGCAAGAGCACAACAAT
TTGGTCAACGTCCCTCTCTGCGTGGATATGTGTCTGAACTGGCTGCTGAATGTTTATGATACGGGAC
GAACAGGGAGGATCCGTGTCCTGTCTTTTAAAACTGGCATCATTTCCCTGTGTAAAGCACATTTGGA
AGACAAGTACAGATACCTTTTCAAGCAAGTGGCAAGTTCAACAGGATTTTGTGACCAGCGCAGGCT
GGGCCTCCTTCTGCATGATTCTATCCAAATTCCAAGACAGTTGGGTGAAGTTGCATCCTTTGGGGGC
AGTAACATTGAGCCAAGTGTCCGGAGCTGCTTCCAATTTGCTAATAATAAGCCAGAGATCGAAGCG
GCCCTCTTCCTAGACTGGATGAGACTGGAACCCCAGTCCATGGTGTGGCTGCCCGTCCTGCACAGAG
TGGCTGCTGCAGAAACTGCCAAGCATCAGGCCAAATGTAACATCTGCAAAGAGTGTCCAATCATTG
GATTCAGGTACAGGAGTCTAAAGCACTTTAATTATGACATCTGCCAAAGCTGCTTTTTTTCTGGTCGA
GTTGCAAAAGGCCATAAAATGCACTATCCCATGGTGGAATATTGCACTCCGACTACATCAGGAGAA
GATGTTCGAGACTTTGCCAAGGTACTAAAAAACAAATTTCGAACCAAAAGGTATTTTGCGAAGCATC
CCCGAATGGGCTACCTGCCAGTGCAGACTGTCTTAGAGGGGGACAACATGGAAACTCCCGTTACTCT
GATCAACTTCTGGCCAGTAGATTCTGCGCCTGCCTCGTCCCCTCAGCTTTCACACGATGATACTCATT
CACGCATTGAACATTATGCTAGCAGGCTAGCAGAAATGGAAAACAGCAATGGATCTTATCTAAATG
ATAGCATCTCTCCTAATGAGAGCATAGATGATGAACATTTGTTAATCCAGCATTACTGCCAAAGTTT
GAACCAGGACTCCCCCCTGAGCCAGCCTCGTAGTCCTGCCCAGATCTTGATTTCCTTAGAGAGTGAG
GAAAGAGGGGAGCTAGAGAGAATCCTAGCAGATCTTGAGGAAGAAAACAGGAATCTGCAAGCAGA
ATATGACCGTCTAAAGCAGCAGCACGAACATAAAGGCCTGTCCCCACTGCCGTCCCCTCCTGAAATG
ATGCCCACCTCTCCCCAGAGTCCCCGGGATGCTGAGCTCATTGCTGAGGCCAAGCTACTGCGTCAAC
ACAAAGGCCGCCTGGAAGCCAGGATGCAAATCCTGGAAGACCACAATAAACAGCTGGAGTCACAGT
TACACAGGCTAAGGCAGCTGCTGGAGCAACCCCAGGCAGAGGCCAAAGTGAATGGCACAACGGTGT
CCTCTCCTTCTACCTCTCTACAGAGGTCCGACAGCAGTCAGCCTATGCTGCTCCGAGTGGTTGGCAGT
CAAACTTCGGACTCCATGGGTGAGGAAGATCTTCTCAGTCCTCCCCAGGACACAAGCACAGGGTTA
GAGGAGGTGATGGAGCAACTCAACAACTCCTTCCCTAGTTCAAGAGGAAGAAATACCCCTGGAAAG
CCAATGAGAGAGGACACAATGTAGGAAGTCTTTTCCACATGGCAGATGATTTGGGCAGAGCGATGG
AGTCCTTAGTATCAGTCATGACAGATGAAGAAGGAGCAGAATAAATGTTTTACAACTCCTGATTCCC
GCATGGTTTTTATAATATTCATACAACAAAGAGGATTAGACAGTAAGAGTTTACAAGAAATAAATCT
ATATTTTTGTGAAGGGTAGTGGTATTATACTGTAGATTTCAGTAGTTTCTAAGTCTGTTATTGTTTTGT
TAACAATGGCAGGTTTTACACGTCTATGCAATTGTACAAAAAAGTTATAAGAAAACTACATGTAAA
ATCTTGATAGCTAAATAACTTGCCATTTCTTTATATGGAACGCATTTTGGGTTGTTTAAAAATTTATA
ACAGTTATAAAGAAAGATTGTAAACTAAAGTGTGCTTTATAAAAAAAAGTTGTTTATAAAAACCCCT
AAAAACAAAACAAACACACACACACACACATACACACACACACACAAAACTTTGAGGCAGCGCATT
GTTTTGCATCCTTTTGGCGTGATATCCATATGAAATTCATGGCTTTTTCTTTTTTTGCATATTAAAGAT
AAGACTTCCTCTACCACCACACCAAATGACTACTACACACTGCTCATTTGAGAACTGTCAGCTGAGT
GGGGCAGGCTTGAGTTTTCATTTCATATATCTATATGTCTATAAGTATATAAATACTATAGTTATATA
GATAAAGAGATACGAATTTCTATAGACTGACTTTTTCCATTTTTTAAATGTTCATGTCACATCCTAAT
AGAAAGAAATTACTTCTAGTCAGTCATCCAGGCTTACCTGCTTGGTCTAGAATGGATTTTTCCCGGA
GCCGGAAGCCAGGAGGAAACTACACCACACTAAAACATTGTCTACAGCTCCAGATGTTTCTCATTTT
AAACAACTTTCCACTGACAACGAAAGTAAAGTAAAGTATTGGATTTTTTTAAAGGGAACATGTGAAT
GAATACACAGGACTTATTATATCAGAGTGAGTAATCGGTTGGTTGGTTGATTGATTGATTGATTGAT
ACATTCAGCTTCCTGCTGCTAGCAATGCCACGATTTAGATTTAATGATGCTTCAGTGGAAATCAATC
AGAAGGTATTCTGACCTTGTGAACATCAGAAGGTATTTTTTAACTCCCAAGCAGTAGCAGGACGATG
ATAGGGCTGGAGGGCTATGGATTCCCAGCCCATCCCTGTGAAGGAGTAGGCCACTCTTTAAGTGAA
GGATTGGATGATTGTTCATAATACATAAAGTTCTCTGTAATTACAACTAAATTATTATGCCCTCTTCT
CACAGTCAAAAGGAACTGGGTGGTTTGGTTTTTGTTGCTTTTTTAGATTTATTGTCCCATGTGGGATG
AGTTTTTAAATGCCACAAGACATAATTTAAAATAAATAAACTTTGGGAAAAGGTGTAAAACAGTAG
CCCCATCACATTTGTGATACTGACAGGTATCAACCCAGAAGCCCATGAACTGTGTTTCCATCCTTTGC
ATTTCTCTGCGAGTAGTTCCACACAGGTTTGTAAGTAAGTAAGAAAGAAGGCAAATTGATTCAAATG
TTACAAAAAAACCCTTCTTGGTGGATTAGACAGGTTAAATATATAAACAAACAAACAAAAATTGCT
CAAAAAAGAGGAGAAAAGCTCAAGAGGAAAAGCTAAGGACTGGTAGGAAAAAGCTTTACTCTTTC
ATGCCATTTTATTTCTTTTTGATTTTTAAATCATTCATTCAATAGATACCACCGTGTGACCTATAATTT
TGCAAATCTGTTACCTCTGACATCAAGTGTAATTAGCTTTTGGAGAGTGGGCTGACATCAAGTGTAA
TTAGCTTTTGGAGAGTGGGTTTTGTCCATTATTAATAATTAATTAATTAACATCAAACACGGCTTCTC
ATGCTATTTCTACCTCACTTTGGTTTTGGGGTGTTCCTGATAATTGTGCACACCTGAGTTCACAGCTT
CACCACTTGTCCATTGCGTTATTTTCTTTTTCCTTTATAATTCTTTCTTTTTCCTTCATAATTTTCAAAA
GAAAACCCAAAGCTCTAAGGTAACAAATTACCAAATTACATGAAGATTTGGTTTTTGTCTTGCATTT
TTTTCCTTTATGTGACGCTGGACCTTTTCTTTACCCAAGGATTTTTAAAACTCAGATTTAAAACAAGG
GGTTACTTTACATCCTACTAAGAAGTTTAAGTAAGTAAGTTTCATTCTAAAATCAGAGGTAAATAGA
GTGCATAAATAATTTTGTTTTAATCTTTTTGTTTTTCTTTTAGACACATTAGCTCTGGAGTGAGTCTGT
CATAATATTTGAACAAAAATTGAGAGCTTTATTGCTGCATTTTAAGCATAATTAATTTGGACATTATT
TCGTGTTGTGTTCTTTATAACCACCAAGTATTAAACTGTAAATCATAATGTAACTGAAGCATAAACA
TCACATGGCATGTTTTGTCATTGTTTTCAGGTACTGAGTTCTTACTTGAGTATCATAATATATTGTGTT
TTAACACCAACACTGTAACATTTACGAATTATTTTTTTAAACTTCAGTTTTACTGCATTTTCACAACA
TATCAGACTTCACCAAATATATGCCTTACTATTGTATTATAGTACTGCTTTACTGTGTATCTCAATAA
AGCACGCAGTTATGTTAC
Homo sapiens dystrophin (DMD), transcript variant Dp427m, exon 8
(nucleotide positions 894-1075 of NCBI Reference Sequence: NM_004006.2)
(SEQ ID NO: 2240)
ATGTTGATACCACCTATCCAGATAAGAAGTCCATCTTAATGTACATCACATCACTCTTCCAAGTTTTG
CCTCAACAAGTGAGCATTGAAGCCATCCAGGAAGTGGAAATGTTGCCAAGGCCACCTAAAGTGACT
AAAGAAGAACATTTTCAGTTACATCATCAAATGCACTATTCTCAACAG
Homo sapiens dystrophin (DMD), transcript variant Dp427m, exon 23
(nucleotide positions 3194-3406 of NCBI Reference Sequence: NM_004006.2)
(SEQ ID NO: 2241)
GCTTTACAAAGTTCTCTGCAAGAGCAACAAAGTGGCCTATACTATCTCAGCACCACTGTGAAAGAGA
TGTCGAAGAAAGCGCCCTCTGAAATTAGCCGGAAATATCAATCAGAATTTGAAGAAATTGAGGGAC
GCTGGAAGAAGCTCTCCTCCCAGCTGGTTGAGCATTGTCAAAAGCTAGAGGAGCAAATGAATAAAC
TCCGAAAAATTCAG
Homo sapiens dystrophin (DMD), transcript variant Dp427m, exon 43
(nucleotide positions 6362-6534 of NCBI Reference Sequence: NM_004006.2)
(SEQ ID NO: 2242)
AATATAAAAGATAGTCTACAACAAAGCTCAGGTCGGATTGACATTATTCATAGCAAGAAGACAGCA
GCATTGCAAAGTGCAACGCCTGTGGAAAGGGTGAAGCTACAGGAAGCTCTCTCCCAGCTTGATTTCC
AATGGGAAAAAGTTAACAAAATGTACAAGGACCGACAAGG
Homo sapiens dystrophin (DMD), transcript variant Dp427m, exon 44
(nucleotide positions 6535-6682 of NCBI Reference Sequence: NM_004006.2)
(SEQ ID NO: 2243)
GCGATTTGACAGATCTGTTGAGAAATGGCGGCGTTTTCATTATGATATAAAGATATTTAATCAGTGG
CTAACAGAAGCTGAACAGTTTCTCAGAAAGACACAAATTCCTGAGAATTGGGAACATGCTAAATAC
AAATGGTATCTTAAG
Homo sapiens dystrophin (DMD), transcript variant Dp427m, exon 45
(nucleotide positions 6683-6858 of NCBI Reference Sequence: NM_004006.2)
(SEQ ID NO: 2244)
GAACTCCAGGATGGCATTGGGCAGCGGCAAACTGTTGTCAGAACATTGAATGCAACTGGGGAAGAA
ATAATTCAGCAATCCTCAAAAACAGATGCCAGTATTCTACAGGAAAAATTGGGAAGCCTGAATCTG
CGGTGGCAGGAGGTCTGCAAACAGCTGTCAGACAGAAAAAAGAG
Homo sapiens dystrophin (DMD), transcript variant Dp427m, exon 46
(nucleotide positions 6859-7006 of NCBI Reference Sequence: NM_004006.2)
(SEQ ID NO: 2245)
GCTAGAAGAACAAAAGAATATCTTGTCAGAATTTCAAAGAGATTTAAATGAATTTGTTTTATGGTTG
GAGGAAGCAGATAACATTGCTAGTATCCCACTTGAACCTGGAAAAGAGCAGCAACTAAAAGAAAA
GCTTGAGCAAGTCAAG
Homo sapiens dystrophin (DMD), transcript variant Dp427m, exon 50
(nucleotide positions 7445-7553 of NCBI Reference Sequence: NM_004006.2)
(SEQ ID NO: 2246)
AGGAAGTTAGAAGATCTGAGCTCTGAGTGGAAGGCGGTAAACCGTTTACTTCAAGAGCTGAGGGCA
AAGCAGCCTGACCTAGCTCCTGGACTGACCACTATTGGAGCCT
Homo sapiens dystrophin (DMD), transcript variant Dp427m, exon 51
(nucleotide positions 7554-7786 of NCBI Reference Sequence: NM_004006.2)
(SEQ ID NO: 2247)
CTCCTACTCAGACTGTTACTCTGGTGACACAACCTGTGGTTACTAAGGAAACTGCCATCTCCAAACT
AGAAATGCCATCTTCCTTGATGTTGGAGGTACCTGCTCTGGCAGATTTCAACCGGGCTTGGACAGAA
CTTACCGACTGGCTTTCTCTGCTTGATCAAGTTATAAAATCACAGAGGGTGATGGTGGGTGACCTTG
AGGATATCAACGAGATGATCATCAAGCAGAAG
Homo sapiens dystrophin (DMD), transcript variant Dp427m, exon 52
(nucleotide positions 7787-7904 of NCBI Reference Sequence: NM_004006.2)
(SEQ ID NO: 2248)
GCAACAATGCAGGATTTGGAACAGAGGCGTCCCCAGTTGGAAGAACTCATTACCGCTGCCCAAAAT
TTGAAAAACAAGACCAGCAATCAAGAGGCTAGAACAATCATTACGGATCGAA
Homo sapiens dystrophin (DMD), transcript variant Dp427m, exon 53
(nucleotide positions 7905-8116 of NCBI Reference Sequence: NM_004006.2)
(SEQ ID NO: 2249)
TTGAAAGAATTCAGAATCAGTGGGATGAAGTACAAGAACACCTTCAGAACCGGAGGCAACAGTTGA
ATGAAATGTTAAAGGATTCAACACAATGGCTGGAAGCTAAGGAAGAAGCTGAGCAGGTCTTAGGAC
AGGCCAGAGCCAAGCTTGAGTCATGGAAGGAGGGTCCCTATACAGTAGATGCAATCCAAAAGAAAA
TCACAGAAACCAAG
Homo sapiens dystrophin (DMD), transcript variant Dp427m, exon 55
(nucleotide positions 8272-8461 of NCBI Reference Sequence: NM_004006.2)
(SEQ ID NO: 2250)
GGTGAGTGAGCGAGAGGCTGCTTTGGAAGAAACTCATAGATTACTGCAACAGTTCCCCCTGGACCT
GGAAAAGTTTCTTGCCTGGCTTACAGAAGCTGAAACAACTGCCAATGTCCTACAGGATGCTACCCGT
AAGGAAAGGCTCCTAGAAGACTCCAAGGGAGTAAAAGAGCTGATGAAACAATGGCAA

[0326] In some embodiments, an oligonucleotide useful for targeting DMD (e.g., for exon skipping) targets an exonic splicing enhancer (ESE) sequence in DMD (e.g., an ESE sequence of exon 23, 44, 45, 46, 50, 51, 52, 53, or 55). In some embodiments, an oligonucleotide useful for targeting DMD (e.g., for exon skipping) targets an exonic splicing enhancer (ESE) sequence in DMD (e.g., an ESE sequence of exon 8, 23, 43, 44, 45, 46, 50, 51, 52, 53, or 55). In some embodiments, an oligonucleotide useful for targeting DMD (e.g., for exon skipping) targets an ESE sequence of DMD exon 51 (e.g., the ESEs listed in Table 15). In some embodiments, an oligonucleotide useful for targeting DMD (e.g., for exon skipping) targets an ESE sequence of DMD exon 8, 23, 42, 44, 45, 46, 50, 52, 53, or 55 (e.g., an ESE listed in Table 11).

[0327] In some embodiments, an oligonucleotide useful for targeting DMD (e.g., for exon skipping, such as for skipping one or more of exons 8, 23, 42, 44, 45, 46, 50, 52, 53, and 55) comprises a region of complementarity to a target sequence comprising one or more full or partial ESEs of a DMD transcript (e.g., one or more full or partial ESEs listed in Table 15 or Table 11). In some embodiments, the oligonucleotide comprises a region of complementarity to a target sequence comprising one or more full or partial ESEs as set forth in SEQ ID NOs: 402-436 and 2043-2238. In some embodiments, the oligonucleotide comprises a region of complementarity to a target sequence comprising at least 4 (e.g., 4, 5, 6, 7, or 8) consecutive nucleotides of an ESE as set forth in any one of SEQ ID NOs: 402-436 and 2043-2238.

TABLE 15
Exonic splicing enhancers within exon 51 of DMD

| | Ref. start | SEQ | ESE Motif | |
|---|---|---|---|---|
| ESE # | position* | ID NO: | Sequence | Name |
| 51-1 | 1565421 | 402 | CTACTCA | Dp427m_51:SRSF5 |
| 51-2 | 1565426 | 403 | CAGACTG | Dp427m_51:SRSF1 (IgM-BRCA1) |
| 51-3 | 1565428 | 404 | GACTGTTA | Dp427m_51:SRSF2 |
| 51-4 | 1565433 | 405 | TTACTCT | Dp427m_51:SRSF5 |
| 51-5 | 1565435 | 406 | ACTCTGG | Dp427m_51:SRSF5 |
| 51-6 | 1565436 | 407 | CTCTGGT | Dp427m_51:SRSF1 (IgM-BRCA1) |
| 51-7 | 1565442 | 408 | TGACACA | Dp427m_51:SRSF5 |
| 51-8 | 1565443 | 409 | GACACAA | Dp427m_51:SRSF1 |
| 51-9 | 1565444 | 410 | ACACAAC | Dp427m_51:SRSF5 |
| 51-10 | 1565448 | 411 | AACCTGTG | Dp427m_51:SRSF2 |
| 51-11 | 1565450 | 412 | CCTGTGG | Dp427m_51:SRSF5 |
| 51-12 | 1565451 | 413 | CTGTGGT | Dp427m_51:SRSF1 (IgM-BRCA1) |
| 51-13 | 1565455 | 414 | GGTTACTA | Dp427m_51:SRSF2 |
| 51-14 | 1565457 | 415 | TTACTAA | Dp427m_51:SRSF5 |
| 51-15 | 1565460 | 416 | CTAAGGA | Dp427m_51:SRSF1 (IgM-BRCA1) |
| 51-16 | 1565469 | 417 | CTGCCAT | Dp427m_51:SRSF1 (IgM-BRCA1) |
| 51-17 | 1565479 | 418 | CAAACTA | Dp427m_51:SRSF1 (IgM-BRCA1) |
| 51-18 | 1565508 | 419 | TGGAGGT | Dp427m_51:SRSF1 |
| 51-19 | 1565512 | 420 | GGTACCTG | Dp427m_51:SRSF2 |
| 51-20 | 1565528 | 421 | GATTTCAA | Dp427m_51:SRSF2 |
| 51-21 | 1565530 | 422 | TTTCAAC | Dp427m_51:SRSF5 |
| 51-22 | 1565532 | 423 | TCAACCG | Dp427m_51:SRSF5 |
| 51-23 | 1565533 | 424 | CAACCGG | Dp427m_51:SRSF1 (IgM-BRCA1) |
| 51-24 | 1565544 | 425 | GGACAGAA | Dp427m_51:SRSF2 |
| 51-25 | 1565556 | 426 | CCGACTG | Dp427m_51:SRSF1 (IgM-BRCA1) |
| 51-26 | 1565557 | 427 | CGACTGG | Dp427m_51:SR.SF5 |
| 51-27 | 1565565 | 428 | TTTCTCTG | Dp427m_51:SRSF2 |
| 51-28 | 1565567 | 429 | TCTCTGC | Dp427m_51:SRSF5 |
| 51-29 | 1565591 | 430 | TCACAGA | Dp427m_51:SRSF5 |
| 51-30 | 1565592 | 431 | CACAGA | Dp427m_51:SRSF6 |
| 51-31 | 1565593 | 432 | ACAGAGG | Dp427m_51:SRSF5 |
| 51-32 | 1565594 | 433 | CAGAGGG | Dp427m_51:SRSF1 (IgM-BRCA1) |
| 51-33 | 1565615 | 434 | CTTGAGG | Dp427m_51:SRSF5 |
| 51-34 | 1565617 | 435 | TGAGGA | Dp427m_51:SRSF6 |
| 51-35 | 1565630 | 436 | GAGATGA | Dp427m_51:SRSF1 |

*Ref. start position refers to the position of the first nucleotide of the ESE motif in nucleotides 5,001-2,225,382 of NCBI Reference Sequence NG_012232.1 (NG_012232, version 1). Nucleotides 5,001-2,225,382 of NCBI Reference Sequence NG_012232.1 (NG_012232, version 1) correspond to Homo sapiens dystrophin (DMD) gene on chromosome X.

TABLE 11
Exonic splicing enhancers within exons 8, 23, 43,
44, 45, 46, 50, 52, 53, and 55 of DMD

| | Ref. start | SEQ ID | ESE Motif | |
|---|---|---|---|---|
| Exon | position* | NO: | Sequence | Name |
| 8 | 640346 | 2047 | TCCATC | Dp427m_8:SRSF6 |
| 8 | 640358 | 2048 | TACATC | Dp427m_8:SRSF6 |
| 8 | 640362 | 2049 | TCACATC | Dp427m_8:SRSF5 |
| 8 | 640363 | 2050 | CACATC | Dp427m_8:SRSF6 |
| 8 | 640367 | 2051 | TCACTCT | Dp427m_8:SRSF5 |
| 8 | 640368 | 2052 | CACTCTT | Dp427m_8:SRSF1 (IgM-BRCA1) |
| 8 | 640373 | 2053 | TTCCAAG | Dp427m_8:SRSF5 |
| 8 | 640383 | 2054 | TGCCTC | Dp427m_8:SRSF6 |
| 8 | 640385 | 2055 | CCTCAAC | Dp427m_8:SRSF5 |
| 8 | 640388 | 2056 | CAACAAG | Dp427m_8:SRSF5 |
| 8 | 640434 | 2057 | GGCCACCT | Dp427m_8:SRSF2 |
| 8 | 640439 | 2058 | CCTAAAG | Dp427m_8:SRSF5 |
| 8 | 640447 | 2059 | GACTAAAG | Dp427m_8:SRSF2 |
| 8 | 640469 | 2060 | TTACATC | Dp427m_8:SRSF5 |
| 8 | 640470 | 2048 | TACATC | Dp427m_8:SRSF6 |
| 8 | 640477 | 2061 | TCAAATG | Dp427m_8:SRSF5 |
| 8 | 640490 | 2062 | TCTCAAC | Dp427m_8:SRSF5 |
| 23 | 870903 | 2063 | TTACAAA | Dp427m_23:SRSF5 |
| 23 | 870910 | 2064 | GTTCTCTG | Dp427m_23:SRSF2 |
| 23 | 870912 | 429 | TCTCTGC | Dp427m_23:SRSF5 |
| 23 | 870933 | 2065 | GGCCTATA | Dp427m_23:SRSF2 |
| 23 | 870944 | 2066 | TCTCAGC | Dp427m_23:SRSF5 |
| 23 | 870945 | 2067 | CTCAGCA | Dp427m_23:SRSF1 (IgM-BRCA1) |
| 23 | 870950 | 2068 | CACCACTG | Dp427m_23:SRSF2 |
| 23 | 870952 | 2069 | CCACTGT | Dp427m_23:SRSF5 |
| 23 | 870970 | 2070 | CGAAGAA | Dp427m_23:SRSF1 (IgM-BRCA1) |
| 23 | 870979 | 2071 | CGCCCTC | Dp427m_23:SRSF1 (IgM-BRCA1) |
| 23 | 870980 | 2072 | GCCCTCTG | Dp427m_23:SRSF2 |
| 23 | 870993 | 2073 | AGCCGGA | Dp427m_23:SRSF1 (IgM-BRCA1) |
| 23 | 871014 | 2074 | TTTGAAG | Dp427m_23:SRSF5 |
| 23 | 871028 | 2075 | GGGACGC | Dp427m_23:SRSF1 |
| 23 | 871029 | 2076 | GGACGCTG | Dp427m_23:SRSF2 |
| 23 | 871032 | 2077 | CGCTGGA | Dp427m_23:SRSF1 (IgM-BRCA1) |
| 23 | 871049 | 2078 | CTCCCAG | Dp427m_23:SRSF1 (IgM-BRCA1) |
| 23 | 871050 | 2079 | TCCCAGC | Dp427m_23:SRSF5 |
| 23 | 871051 | 2080 | CCCAGCT | Dp427m_23:SRSF1 (IgM-BRCA1) |
| 23 | 871053 | 2081 | CAGCTGG | Dp427m_23:SRSF1 (IgM-BRCA1) |
| 23 | 871070 | 2082 | TCAAAAG | Dp427m_23:SRSF5 |
| 23 | 871077 | 2083 | CTAGAGG | Dp427m_23:SRSF5 |
| 23 | 871078 | 2084 | TAGAGGA | Dp427m_23:SRSF1 |
| 23 | 871090 | 2085 | TGAATA | Dp427m_23:SRSF6 |
| 23 | 871098 | 2086 | CTCCGAA | Dp427m_23:SRSF1 (IgM-BRCA1) |
| 43 | 1051912 | 2087 | ATAAAAG | Dp427m_43:SRSF5 |
| 43 | 1051922 | 2088 | GTCTACAA | Dp427m_43:SRSF2 |
| 43 | 1051924 | 2089 | CTACAAC | Dp427m_43:SRSF5 |
| 43 | 1051929 | 2090 | ACAAAGC | Dp427m_43:SRSF5 |
| 43 | 1051934 | 2091 | GCTCAGG | Dp427m_43:SRSF5 |
| 43 | 1051935 | 2092 | CTCAGGT | Dp427m_43:SRSF1 (IgM-BRCA1) |
| 43 | 1051955 | 2093 | TTCATA | Dp427m_43:SRSF6 |
| 43 | 1051956 | 2094 | TCATAGC | Dp427m_43:SRSF5 |
| 43 | 1051967 | 2095 | AGACAGC | Dp427m_43:SRSF5 |
| 43 | 1051971 | 2096 | AGCAGC | Dp427m_43:SRSF6 |
| 43 | 1051986 | 2097 | TGCAAC | Dp427m_43:SRSF6 |
| 43 | 1051991 | 2098 | CGCCTGTG | Dp427m_43:SRSF2 |
| 43 | 1051993 | 412 | CCTGTGG | Dp427m_43:SRSF5 |
| 43 | 1051994 | 2099 | CTGTGGA | Dp427m_43:SRSF1 (IgM-BRCA1) |
| 43 | 1051995 | 2100 | TGTGGA | Dp427m_43:SR.SF6 |
| 43 | 1052009 | 2101 | AGCTACAG | Dp427m_43:SRSF2 |
| 43 | 1052011 | 2102 | CTACAGG | Dp427m_43:SRSF5 |
| 43 | 1052012 | 2103 | TACAGGA | Dp427m_43:SRSF1 (IgM-BRCA1) |
| 43 | 1052022 | 2104 | TCTCTCC | Dp427m_43:SRSF5 |
| 43 | 1052023 | 2105 | CTCTCCCA | Dp427m_43:SRSF2 |
| 43 | 1052025 | 2078 | CTCCCAG | Dp427m_43:SRSF1 (IgM-BRCA1) |
| 43 | 1052026 | 2079 | TCCCAGC | Dp427m_43:SRSF5 |
| 43 | 1052027 | 2080 | CCCAGCT | Dp427m_43:SRSF1 (IgM-BRCA1) |
| 43 | 1052035 | 2106 | GATTTCCA | Dp427m_43:SRSF2 |
| 43 | 1052040 | 2107 | CCAATGG | Dp427m_43:SRSF5 |
| 43 | 1052064 | 2108 | GTACAAG | Dp427m_43:SRSF5 |
| 43 | 1052071 | 2109 | GACCGACA | Dp427m_43:SRSF2 |
| 43 | 1052073 | 2110 | CCGACAA | Dp427m_43:SRSF1 (IgM-BRCA1) |
| 43 | 1052074 | 2111 | CGACAAG | Dp427m_43:SRSF5 |
| 44 | 1122553 | 2112 | TGACAGA | Dp427m_44:SRSF5 |
| 44 | 1122575 | 2113 | CGGCGTT | Dp427m_44:SRSF1 (IgM-BRCA1) |
| 44 | 1122607 | 2114 | TCAGTGG | Dp427m_44:SRSF5 |
| 44 | 1122612 | 2115 | GGCTAACA | Dp427m_44:SR.SF2 |
| 44 | 1122617 | 2116 | ACAGAAG | Dp427m_44:SRSF5 |
| 44 | 1122634 | 2117 | TCTCAGA | Dp427m_44:SRSF5 |
| 44 | 1122635 | 2118 | CTCAGAA | Dp427m_44:SRSF1 (IgM-BRCA1) |
| 44 | 1122643 | 409 | GACACAA | Dp427m_44:SRSF1 |
| 44 | 1122649 | 2119 | AATTCCTG | Dp427m_44:SRSF2 |
| 44 | 1122654 | 2120 | CTGAGAA | Dp427m_44:SRSF1 (IgM-BRCA1) |
| 44 | 1122685 | 2121 | GTATCTTA | Dp427m_44:SR.SF2 |
| 45 | 1371096 | 2122 | GAACTCCA | Dp427m_45:SRSF2 |
| 45 | 1371097 | 2123 | AACTCCAG | Dp427m_45:SRSF2 |
| 45 | 1371099 | 2124 | CTCCAGG | Dp427m_45:SRSF5 |
| 45 | 1371117 | 2125 | CAGCGGC | Dp427m_45:SRSF1 (IgM-BRCA1) |
| 45 | 1371118 | 2126 | AGCGGC | Dp427m_45:SRSF6 |
| 45 | 1371133 | 2127 | TCAGAAC | Dp427m_45:SRSF5 |
| 45 | 1371136 | 2128 | GAACATTG | Dp427m_45:SR.SF2 |
| 45 | 1371142 | 2129 | TGAATGC | Dp427m_45:SRSF5 |
| 45 | 1371143 | 2130 | GAATGCAA | Dp427m_45:SRSF2 |
| 45 | 1371146 | 2097 | TGCAAC | Dp427m_45:SRSF6 |
| 45 | 1371148 | 2131 | CAACTGG | Dp427m_45:SRSF5 |
| 45 | 1371151 | 2132 | CTGGGGA | Dp427m_45:SRSF1 (IgM-BRCA1) |
| 45 | 1371165 | 2133 | ATTCAGC | Dp427m_45:SRSF5 |
| 45 | 1371188 | 2134 | TGCCAGTA | Dp427m_45:SRSF2 |
| 45 | 1371193 | 2135 | GTATTCTA | Dp427m_45:SRSF2 |
| 45 | 1371198 | 2102 | CTACAGG | Dp427m_45:SRSF5 |
| 45 | 1371199 | 2103 | TACAGGA | Dp427m_45:SRSF1 (IgM-BRCA1) |
| 45 | 1371220 | 2136 | TGAATC | Dp427m_45:SRSF6 |
| 45 | 1371225 | 2137 | CTGCGGT | Dp427m_45:SRSF1 (IgM-BRCA1) |
| 45 | 1371226 | 2138 | TGCGGT | Dp427m_45:SRSF6 |
| 45 | 1371228 | 2139 | CGGTGGC | Dp427m_45:SRSF1 (IgM-BRCA1) |
| 45 | 1371231 | 2140 | TGGCAGG | Dp427m_45:SRSF5 |
| 45 | 1371232 | 2141 | GGCAGGA | Dp427m_45:SRSF1 (IgM-BRCA1) |
| 45 | 1371235 | 2142 | AGGAGGT | Dp427m_45:SRSF1 |
| 45 | 1371239 | 2143 | GGTCTGCA | Dp427m_45:SRSF2 |
| 45 | 1371240 | 2144 | GTCTGCAA | Dp427m_45:SRSF2 |
| 45 | 1371249 | 2145 | CAGCTGT | Dp427m_45:SRSF1 (IgM-BRCA1) |
| 45 | 1371256 | 2146 | CAGACAG | Dp427m_45:SRSF1 (IgM-BRCA1) |
| 46 | 1407384 | 2147 | CTAGAAG | Dp427m_46:SRSF5 |
| 46 | 1407392 | 2148 | ACAAAAG | Dp427m_46:SRSF5 |
| 46 | 1407438 | 2149 | GTTTTATG | Dp427m_46:SRSF2 |
| 46 | 1407440 | 2150 | TTTATGG | Dp427m_46:SRSF5 |
| 46 | 1407445 | 2151 | GGTTGGAG | Dp427m_46:SRSF2 |
| 46 | 1407448 | 2152 | TGGAGGA | Dp427m_46:SRSF1 (IgM-BRCA1) |
| 46 | 1407472 | 2153 | GTATCCCA | Dp427m_46:SRSF2 |
| 46 | 1407476 | 2154 | CCCACTT | Dp427m_46:SRSF1 (IgM-BRCA1) |
| 46 | 1407477 | 2155 | CCACTTG | Dp427m_46:SRSF5 |
| 46 | 1407478 | 2156 | CACTTGA | Dp427m_46:SRSF1 (IgM-BRCA1) |
| 46 | 1407496 | 2096 | AGCAGC | Dp427m_46:SRSF6 |
| 16 | 1407504 | 2157 | CTAAAAG | Dp427m_46:SRSF5 |
| 46 | 1407524 | 2158 | AGTCAAG | Dp427m_46:SRSF5 |
| 50 | 1519533 | 2159 | TTAGAAG | Dp427m_50:SRSF5 |
| 50 | 1519539 | 2160 | GATCTGAG | Dp427m_50:SRSF2 |
| 50 | 1519541 | 2161 | TCTGAGC | Dp427m_50:SRSF5 |
| 50 | 1519542 | 2162 | CTGAGCT | Dp427m_50:SRSF1 (IgM-BRCA1) |
| 50 | 1519544 | 2163 | GAGCTCTG | Dp427m_50:SRSF2 |
| 50 | 1519549 | 2164 | CTGAGTG | Dp427m_50:SRSF1 (IgM-BRCA1) |
| 50 | 1519550 | 2165 | TGAGTGG | Dp427m_50:SRSF5 |
| 50 | 1519572 | 2166 | TTACTTC | Dp427m_50:SRSF5 |
| 50 | 1519573 | 2167 | TACTTC | Dp427m_50:SRSF6 |
| 50 | 1519575 | 2168 | CTTCAAG | Dp427m_50:SRSF5 |
| 50 | 1519584 | 2169 | CTGAGGG | Dp427m_50:SRSF1 (IgM-BRCA1) |
| 50 | 1519594 | 2096 | AGCAGC | Dp427m_50:SRSF6 |
| 50 | 1519596 | 2170 | CAGCCTG | Dp427m_50:SRSF1 (IgM-BRCA1) |
| 50 | 1519600 | 2171 | CTGACCT | Dp427m_50:SRSF1 (IgM-BRCA1) |
| 50 | 1519607 | 2172 | AGCTCCTG | Dp427m_50:SRSF2 |
| 50 | 1519609 | 2173 | CTCCTGG | Dp427m_50:SRSF5 |
| 50 | 1519617 | 2174 | CTGACCA | Dp427m_50:SRSF1 (IgM-BRCA1) |
| 50 | 1519619 | 2175 | GACCACTA | Dp427m_50:SRSF2 |
| 50 | 1519621 | 2176 | CCACTAT | Dp427m_50:SRSF5 |
| 50 | 1519624 | 2177 | CTATTGG | Dp427m_50:SRSF5 |
| 52 | 1609869 | 2178 | TGCAGG | Dp427m_52:SR.SF6 |
| 52 | 1609880 | 2179 | GAACAGAG | Dp427m_52:SRSF2 |
| 52 | 1609882 | 432 | ACAGAGG | Dp427m_52:SRSF5 |
| 52 | 1609883 | 2180 | CAGAGGC | Dp427m_52:SRSF1 (IgM-BRCA1) |
| 52 | 1609887 | 2181 | GGCGTC | Dp427m_52:SR.SF6 |
| 52 | 1609889 | 2182 | CGTCCCCA | Dp427m_52:SRSF2 |
| in | 1609890 | 2183 | GTCCCCAG | Dp427m_52:SRSF2 |
| 52 | 1609892 | 2184 | CCCCAGT | Dp427m_52:SRSF1 (IgM-BRCA1) |
| 52 | 1609893 | 2185 | CCCAGTT | Dp427m_52:SRSF1 (IgM-BRCA1) |
| 52 | 1609911 | 2186 | TTACCGC | Dp427m_52:SRSF5 |
| 52 | 1609912 | 2187 | TACCGCTG | Dp427m_52:SRSF2 |
| 52 | 1609917 | 2188 | CTGCCCA | Dp427m_52:SRSF1 (IgM-BRCA1) |
| 52 | 1609939 | 2189 | GACCAGCA | Dp427m_52:SR.SF2 |
| 52 | 1609954 | 2190 | GGCTAGAA | Dp427m_52:SRSF2 |
| 52 | 1609969 | 2191 | TACGGA | Dp427m_52:SRSF6 |
| 52 | 1609972 | 2192 | GGATCGAA | Dp427m_52:SRSF2 |
| 53 | 1660030 | 2193 | GAATTCAG | Dp427m_53:SRSF2 |
| 53 | 1660040 | 2114 | TCAGTGG | Dp427m_53:SRSF5 |
| 53 | 1660041 | 2194 | CAGTGGG | Dp427m_53:SRSF1 (IgM-BRCA1) |
| 53 | 1660053 | 2108 | GTACAAG | Dp427m_53:SRSF5 |
| 53 | 1660067 | 2127 | TCAGAAC | Dp427m_53:SRSF5 |
| 53 | 1660071 | 2195 | AACCGGA | Dp427m_53:SRSF1 |
| 53 | 1660074 | 2196 | CGGAGGC | Dp427m_53:SRSF1 (IgM-BRCA1) |
| 53 | 1660098 | 2197 | TTAAAGG | Dp427m_53:SRSF5 |
| 53 | 1660103 | 2198 | GGATTCAA | Dp427m_53:SRSF2 |
| 53 | 1660112 | 2199 | ACAATGG | Dp427m_53:SRSF5 |
| 53 | 1660117 | 2200 | GGCTGGAA | Dp427m_53:SRSF2 |
| 53 | 1660126 | 416 | CTAAGGA | Dp427m_53:SRSF1 (IgM-BRCA1) |
| 53 | 1660138 | 2201 | CTGAGCA | Dp427m_53:SRSF1 (IgM-BRCA1) |
| 53 | 1660141 | 2202 | AGCAGGT | Dp427m_53:SRSF1 (IgM-BRCA1) |
| 53 | 1660147 | 2203 | TCTTAGG | Dp427m_53:SRSF5 |
| 53 | 1660148 | 2204 | CTTAGGA | Dp427m_53:SRSF1 (IgM-BRCA1) |
| 53 | 1660152 | 2205 | GGACAGG | Dp427m_53:SRSF5 |
| 53 | 1660153 | 2206 | GACAGGC | Dp427m_53:SRSF1 |
| 53 | 1660157 | 2207 | GGCCAGAG | Dp427m_53:SRSF2 |
| 53 | 1660159 | 2208 | CCAGAGC | Dp427m_53:SRSF5 |
| 53 | 1660172 | 2209 | TGAGTC | Dp427m_53:SRSF6 |
| 53 | 1660183 | 2210 | AGGAGGG | Dp427m_53:SRSF1 |
| 53 | 1660188 | 2211 | GGTCCCTA | Dp427m_53:SRSF2 |
| 53 | 1660197 | 2212 | ACAGTAG | Dp427m_53:SRSF5 |
| 53 | 1660211 | 2213 | CCAAAAG | Dp427m_53:SRSF5 |
| 53 | 1660222 | 430 | TCACAGA | Dp427m_53:SRSF5 |
| 53 | 1660223 | 431 | CACAGA | Dp427m_53:SR.SF6 |
| 55 | 1711758 | 2214 | CGAGAGG | Dp427m_55:SRSF5 |
| 55 | 1711763 | 2215 | GGCTGCTT | Dp427m_55:SR.SF2 |
| 55 | 1711786 | 2216 | GATTACTG | Dp427m_55:SR.SF2 |
| 55 | 1711788 | 2217 | TTACTGC | Dp427m_55:SRSF5 |
| 55 | 1711792 | 2097 | TGCAAC | Dp427m_55:SRSF6 |
| 55 | 1711802 | 2218 | CCCCCTG | Dp427m_55:SRSF1 (IgM-BRCA1) |
| 55 | 1711803 | 2219 | CCCCTGG | Dp427m_55:SRSF5 |
| 55 | 1711804 | 2220 | CCCTGGA | Dp427m_55:SRSF1 (IgM-BRCA1) |
| 55 | 1711820 | 2221 | GTTTCTTG | Dp427m_55:SRSF2 |
| 55 | 1711821 | 2222 | TTTCTTG | Dp427m_55:SRSF5 |
| 55 | 1711826 | 2223 | TGCCTGG | Dp427m_55:SRSF5 |
| 55 | 1711831 | 2224 | GGCTTACA | Dp427m_55:SRSF2 |
| 55 | 1711834 | 2225 | TTACAGA | Dp427m_55:SRSF5 |
| 55 | 1711835 | 2226 | TACAGA | Dp427m_55:SRSF6 |
| 55 | 1711836 | 2116 | ACAGAAG | Dp427m_55:SRSF5 |
| 55 | 1711852 | 2227 | CTGCCAA | Dp427m_55:SRSF1 (IgM-BRCA1) |
| 55 | 1711853 | 2228 | TGCCAATG | Dp427m_55:SRSF2 |
| 55 | 1711860 | 2229 | GTCCTACA | Dp427m_55:SRSF2 |
| 55 | 1711863 | 2102 | CTACAGG | Dp427m_55:SRSF5 |
| 55 | 1711864 | 2103 | TACAGGA | Dp427m_55:SRSF1 (IgM-BRCA1) |
| 55 | 1711868 | 2230 | GGATGCTA | Dp427m_55:SRSF2 |
| 55 | 1711873 | 2231 | CTACCCG | Dp427m_55:SRSF5 |
| 55 | 1711874 | 2232 | TACCCGTA | Dp427m_55:SRSF2 |
| 55 | 1711888 | 2233 | GGCTCCTA | Dp427m_55:SRSF2 |
| 55 | 1711893 | 2147 | CTAGAAG | Dp427m_55:SRSF5 |
| 55 | 1711898 | 2234 | AGACTCC | Dp427m_55:SRSF5 |
| 55 | 1711899 | 2235 | GACTCCAA | Dp427m_55:SRSF2 |
| 55 | 1711901 | 2236 | CTCCAAG | Dp427m_55:SRSF5 |
| 55 | 1711903 | 2237 | CCAAGGG | Dp427m_55:SRSF1 (IgM-BRCA1) |
| 55 | 1711920 | 2238 | CTGATGA | Dp427m_55:SRSF1 (IgM-BRCA1) |
| 55 | 1711928 | 2199 | ACAATGG | Dp427m_55:SRSF5 |

*Ref. start position refers to the position of the first nucleotide of the ESE motif in nucleotides 5,001-2,225,382 of NCBI Reference Sequence NG_012232.1 (NG_012232, version 1). Nucleotides 5,001-2,225,382 of NCBI Reference Sequence NG_012232.1 (NG_012232, version 1) correspond to Homo sapiens dystrophin (DMD) gene on chromosome X.

[0328] In some embodiments, the oligonucleotide comprises a region of complementarity to a target sequence comprising one or more full or partial ESEs of DMD exon 8. In some embodiments, the oligonucleotide comprises a region of complementarity to a target sequence comprising at least 4 (e.g., 4, 5, 6, 7, or 8) consecutive nucleotides of an ESE of DMD exon 8. In some embodiments, the oligonucleotide comprises a region of complementarity to a target sequence comprising one or more full or partial ESEs as set forth in SEQ ID NOs: 2047-2062. In some embodiments, the oligonucleotide comprises a region of complementarity to a target sequence comprising at least 4 (e.g., 4, 5, 6, 7, or 8) consecutive nucleotides of an ESE as set forth in any one of SEQ ID NOs: 2047-2062.

[0329] In some embodiments, the oligonucleotide comprises a region of complementarity to a target sequence comprising at least 6 (e.g., 6, 7, 8, 9, 10, 11, 12, 13, 14, 15, 16, 17, 18, 19, 20, or more) nucleotides of one or more ESEs (e.g., 2, 3, 4, or more adjacent ESEs) of DMD exon 8. In some embodiments, the oligonucleotide comprises a region of complementarity to a target sequence comprising at least 6 (e.g., 6, 7, 8, 9, 10, 11, 12, 13, 14, 15, 16, 17, 18, 19, 20, or more) nucleotides of one or more ESEs (e.g., 2, 3, 4, or more adjacent ESEs) as set forth in SEQ ID NOs: 2047-2062.

[0330] In some embodiments, an oligonucleotide useful for targeting DMD (e.g., for exon skipping) is 18-35 nucleotides in length, and comprises a region of complementarity to a target sequence comprising at least 4 (e.g., 4, 5, 6, 7, or 8) consecutive nucleotides of an ESE as set forth in any one of SEQ ID NOs: 2047-2062. In some embodiments, an oligonucleotide useful for targeting DMD (e.g., for exon skipping) is 20-30 (e.g., 20, 25, 30) nucleotides in length, and comprises a region of complementarity to a target sequence comprising at least 4 (e.g., 4, 5, 6, 7, or 8) consecutive nucleotides of an ESE as set forth in any one of SEQ ID NOs: 2047-2062. In some embodiments, an oligonucleotide useful for targeting DMD (e.g., for exon skipping) is 20 nucleotides in length, and comprises a region of complementarity to a target sequence comprising at least 4 (e.g., 4, 5, 6, 7, or 8) consecutive nucleotides of an ESE as set forth in any one of SEQ ID NOs: 2047-2062. In some embodiments, an oligonucleotide useful for targeting DMD (e.g., for exon skipping) is 30 nucleotides in length, and comprises a region of complementarity to a target sequence comprising at least 4 (e.g., 4, 5, 6, 7, or 8) consecutive nucleotides of an ESE as set forth in any one of SEQ ID NOs: 2047-2062.

[0331] In some embodiments, the oligonucleotide comprises a region of complementarity to a target sequence comprising one or more full or partial ESEs of DMD exon 23. In some embodiments, the oligonucleotide comprises a region of complementarity to a target sequence comprising at least 4 (e.g., 4, 5, 6, 7, or 8) consecutive nucleotides of an ESE of DMD exon 23. In some embodiments, the oligonucleotide comprises a region of complementarity to a target sequence comprising one or more full or partial ESEs as set forth in SEQ ID NOs: 429 and 2063-2086. In some embodiments, the oligonucleotide comprises a region of complementarity to a target sequence comprising at least 4 (e.g., 4, 5, 6, 7, or 8) consecutive nucleotides of an ESE as set forth in any one of SEQ ID NOs: 429 and 2063-2086.

[0332] In some embodiments, the oligonucleotide comprises a region of complementarity to a target sequence comprising at least 6 (e.g., 6, 7, 8, 9, 10, 11, 12, 13, 14, 15, 16, 17, 18, 19, 20, or more) nucleotides of one or more ESEs (e.g., 2, 3, 4, or more adjacent ESEs) of DMD exon 23. In some embodiments, the oligonucleotide comprises a region of complementarity to a target sequence comprising at least 6 (e.g., 6, 7, 8, 9, 10, 11, 12, 13, 14, 15, 16, 17, 18, 19, 20, or more) nucleotides of one or more ESEs (e.g., 2, 3, 4, or more adjacent ESEs) as set forth in SEQ ID NOs: 429 and 2063-2086.

[0333] In some embodiments, an oligonucleotide useful for targeting DMD (e.g., for exon skipping) is 18-35 nucleotides in length, and comprises a region of complementarity to a target sequence comprising at least 4 (e.g., 4, 5, 6, 7, or 8) consecutive nucleotides of an ESE as set forth in any one of SEQ ID NOs: 429 and 2063-2086. In some embodiments, an oligonucleotide useful for targeting DMD (e.g., for exon skipping) is 20-30 (e.g., 20, 25, 30) nucleotides in length, and comprises a region of complementarity to a target sequence comprising at least 4 (e.g., 4, 5, 6, 7, or 8) consecutive nucleotides of an ESE as set forth in any one of SEQ ID NOs: 429 and 2063-2086. In some embodiments, an oligonucleotide useful for targeting DMD (e.g., for exon skipping) is 20 nucleotides in length, and comprises a region of complementarity to a target sequence comprising at least 4 (e.g., 4, 5, 6, 7, or 8) consecutive nucleotides of an ESE as set forth in any one of SEQ ID NOs: 429 and 2063-2086. In some embodiments, an oligonucleotide useful for targeting DMD (e.g., for exon skipping) is 30 nucleotides in length, and comprises a region of complementarity to a target sequence comprising at least 4 (e.g., 4, 5, 6, 7, or 8) consecutive nucleotides of an ESE as set forth in any one of SEQ ID NOs: 429 and 2063-2086.

[0334] In some embodiments, the oligonucleotide comprises a region of complementarity to a target sequence comprising one or more full or partial ESEs of DMD exon 43. In some embodiments, the oligonucleotide comprises a region of complementarity to a target sequence comprising at least 4 (e.g., 4, 5, 6, 7, or 8) consecutive nucleotides of an ESE of DMD exon 43. In some embodiments, the oligonucleotide comprises a region of complementarity to a target sequence comprising one or more full or partial ESEs as set forth in SEQ ID NOs: 412, 2078-2080, and 2087-2111. In some embodiments, the oligonucleotide comprises a region of complementarity to a target sequence comprising at least 4 (e.g., 4, 5, 6, 7, or 8) consecutive nucleotides of an ESE as set forth in any one of SEQ ID NOs: 412, 2078-2080, and 2087-2111.

[0335] In some embodiments, the oligonucleotide comprises a region of complementarity to a target sequence comprising at least 6 (e.g., 6, 7, 8, 9, 10, 11, 12, 13, 14, 15, 16, 17, 18, 19, 20, or more) nucleotides of one or more ESEs (e.g., 2, 3, 4, or more adjacent ESEs) of DMD exon 43. In some embodiments, the oligonucleotide comprises a region of complementarity to a target sequence comprising at least 6 (e.g., 6, 7, 8, 9, 10, 11, 12, 13, 14, 15, 16, 17, 18, 19, 20, or more) nucleotides of one or more ESEs (e.g., 2, 3, 4, or more adjacent ESEs) as set forth in SEQ ID NOs: 412, 2078-2080, and 2087-2111.

[0336] In some embodiments, an oligonucleotide useful for targeting DMD (e.g., for exon skipping) is 18-35 nucleotides in length, and comprises a region of complementarity to a target sequence comprising at least 4 (e.g., 4, 5, 6, 7, or 8) consecutive nucleotides of an ESE as set forth in any one of SEQ ID NOs: 412, 2078-2080, and 2087-2111. In some embodiments, an oligonucleotide useful for targeting DMD (e.g., for exon skipping) is 20-30 (e.g., 20, 25, 30) nucleotides in length, and comprises a region of complementarity to a target sequence comprising at least 4 (e.g., 4, 5, 6, 7, or 8) consecutive nucleotides of an ESE as set forth in any one of SEQ ID NOs: 412, 2078-2080, and 2087-2111. In some embodiments, an oligonucleotide useful for targeting DMD (e.g., for exon skipping) is 20 nucleotides in length, and comprises a region of complementarity to a target sequence comprising at least 4 (e.g., 4, 5, 6, 7, or 8) consecutive nucleotides of an ESE as set forth in any one of SEQ ID NOs: 412, 2078-2080, and 2087-2111. In some embodiments, an oligonucleotide useful for targeting DMD (e.g., for exon skipping) is 30 nucleotides in length, and comprises a region of complementarity to a target sequence comprising at least 4 (e.g., 4, 5, 6, 7, or 8) consecutive nucleotides of an ESE as set forth in any one of SEQ ID NOs: 412, 2078-2080, and 2087-2111.

[0337] In some embodiments, the oligonucleotide comprises a region of complementarity to a target sequence comprising one or more full or partial ESEs of DMD exon 44. In some embodiments, the oligonucleotide comprises a region of complementarity to a target sequence comprising at least 4 (e.g., 4, 5, 6, 7, or 8) consecutive nucleotides of an ESE of DMD exon 44. In some embodiments, the oligonucleotide comprises a region of complementarity to a target sequence comprising one or more full or partial ESEs as set forth in SEQ ID NOs: 409 and 2112-2121. In some embodiments, the oligonucleotide comprises a region of complementarity to a target sequence comprising at least 4 (e.g., 4, 5, 6, 7, or 8) consecutive nucleotides of an ESE as set forth in any one of SEQ ID NOs: 409 and 2112-2121.

[0338] In some embodiments, the oligonucleotide comprises a region of complementarity to a target sequence comprising at least 6 (e.g., 6, 7, 8, 9, 10, 11, 12, 13, 14, 15, 16, 17, 18, 19, 20, or more) nucleotides of one or more ESEs (e.g., 2, 3, 4, or more adjacent ESEs) of DMD exon 44. In some embodiments, the oligonucleotide comprises a region of complementarity to a target sequence comprising at least 6 (e.g., 6, 7, 8, 9, 10, 11, 12, 13, 14, 15, 16, 17, 18, 19, 20, or more) nucleotides of one or more ESEs (e.g., 2, 3, 4, or more adjacent ESEs) as set forth in SEQ ID NOs: 409 and 2112-2121.

[0339] In some embodiments, an oligonucleotide useful for targeting DMD (e.g., for exon skipping) is 18-35 nucleotides in length, and comprises a region of complementarity to a target sequence comprising at least 4 (e.g., 4, 5, 6, 7, or 8) consecutive nucleotides of an ESE as set forth in any one of SEQ ID NOs: 409 and 2112-2121. In some embodiments, an oligonucleotide useful for targeting DMD (e.g., for exon skipping) is 20-30 (e.g., 20, 25, 30) nucleotides in length, and comprises a region of complementarity to a target sequence comprising at least 4 (e.g., 4, 5, 6, 7, or 8) consecutive nucleotides of an ESE as set forth in any one of SEQ ID NOs: 409 and 2112-2121. In some embodiments, an oligonucleotide useful for targeting DMD (e.g., for exon skipping) is 20 nucleotides in length, and comprises a region of complementarity to a target sequence comprising at least 4 (e.g., 4, 5, 6, 7, or 8) consecutive nucleotides of an ESE as set forth in any one of SEQ ID NOs: 409 and 2112-2121.In some embodiments, an oligonucleotide useful for targeting DMD (e.g., for exon skipping) is 30 nucleotides in length, and comprises a region of complementarity to a target sequence comprising at least 4 (e.g., 4, 5, 6, 7, or 8) consecutive nucleotides of an ESE as set forth in any one of SEQ ID NOs: 409 and 2112-2121.

[0340] In some embodiments, the oligonucleotide comprises a region of complementarity to a target sequence comprising one or more full or partial ESEs of DMD exon 45. In some embodiments, the oligonucleotide comprises a region of complementarity to a target sequence comprising at least 4 (e.g., 4, 5, 6, 7, or 8) consecutive nucleotides of an ESE of DMD exon 45. In some embodiments, the oligonucleotide comprises a region of complementarity to a target sequence comprising one or more full or partial ESEs as set forth in SEQ ID NOs: 2097, 2102, 2103, and 2122-2146. In some embodiments, the oligonucleotide comprises a region of complementarity to a target sequence comprising at least 4 (e.g., 4, 5, 6, 7, or 8) consecutive nucleotides of an ESE as set forth in any one of SEQ ID NOs: 2097, 2102, 2103, and 2122-2146.

[0341] In some embodiments, the oligonucleotide comprises a region of complementarity to a target sequence comprising at least 6 (e.g., 6, 7, 8, 9, 10, 11, 12, 13, 14, 15, 16, 17, 18, 19, 20, or more) nucleotides of one or more ESEs (e.g., 2, 3, 4, or more adjacent ESEs) of DMD exon 45. In some embodiments, the oligonucleotide comprises a region of complementarity to a target sequence comprising at least 6 (e.g., 6, 7, 8, 9, 10, 11, 12, 13, 14, 15, 16, 17, 18, 19, 20, or more) nucleotides of one or more ESEs (e.g., 2, 3, 4, or more adjacent ESEs) as set forth in SEQ ID NOs: 2097, 2102, 2103, and 2122-2146.

[0342] In some embodiments, an oligonucleotide useful for targeting DMD (e.g., for exon skipping) is 18-35 nucleotides in length, and comprises a region of complementarity to a target sequence comprising at least 4 (e.g., 4, 5, 6, 7, or 8) consecutive nucleotides of an ESE as set forth in any one of SEQ ID NOs: 2097, 2102, 2103, and 2122-2146. In some embodiments, an oligonucleotide useful for targeting DMD (e.g., for exon skipping) is 20-30 (e.g., 20, 25, 30) nucleotides in length, and comprises a region of complementarity to a target sequence comprising at least 4 (e.g., 4, 5, 6, 7, or 8) consecutive nucleotides of an ESE as set forth in any one of SEQ ID NOs: 2097, 2102, 2103, and 2122-2146. In some embodiments, an oligonucleotide useful for targeting DMD (e.g., for exon skipping) is 20 nucleotides in length, and comprises a region of complementarity to a target sequence comprising at least 4 (e.g., 4, 5, 6, 7, or 8) consecutive nucleotides of an ESE as set forth in any one of SEQ ID NOs: 2097, 2102, 2103, and 2122-2146. In some embodiments, an oligonucleotide useful for targeting DMD (e.g., for exon skipping) is 30 nucleotides in length, and comprises a region of complementarity to a target sequence comprising at least 4 (e.g., 4, 5, 6, 7, or 8) consecutive nucleotides of an ESE as set forth in any one of SEQ ID NOs: 2097, 2102, 2103, and 2122-2146.

[0343] In some embodiments, the oligonucleotide comprises a region of complementarity to a target sequence comprising one or more full or partial ESEs of DMD exon 46. In some embodiments, the oligonucleotide comprises a region of complementarity to a target sequence comprising at least 4 (e.g., 4, 5, 6, 7, or 8) consecutive nucleotides of an ESE of DMD exon 46. In some embodiments, the oligonucleotide comprises a region of complementarity to a target sequence comprising one or more full or partial ESEs as set forth in SEQ ID NOs: 2096 and 2147-2158. In some embodiments, the oligonucleotide comprises a region of complementarity to a target sequence comprising at least 4 (e.g., 4, 5, 6, 7, or 8) consecutive nucleotides of an ESE as set forth in any one of SEQ ID NOs: 2096 and 2147-2158.

[0344] In some embodiments, the oligonucleotide comprises a region of complementarity to a target sequence comprising at least 6 (e.g., 6, 7, 8, 9, 10, 11, 12, 13, 14, 15, 16, 17, 18, 19, 20, or more) nucleotides of one or more ESEs (e.g., 2, 3, 4, or more adjacent ESEs) of DMD exon 46. In some embodiments, the oligonucleotide comprises a region of complementarity to a target sequence comprising at least 6 (e.g., 6, 7, 8, 9, 10, 11, 12, 13, 14, 15, 16, 17, 18, 19, 20, or more) nucleotides of one or more ESEs (e.g., 2, 3, 4, or more adjacent ESEs) as set forth in SEQ ID NOs: 2096 and 2147-2158.

[0345] In some embodiments, an oligonucleotide useful for targeting DMD (e.g., for exon skipping) is 18-35 nucleotides in length, and comprises a region of complementarity to a target sequence comprising at least 4 (e.g., 4, 5, 6, 7, or 8) consecutive nucleotides of an ESE as set forth in any one of SEQ ID NOs: 2096 and 2147-2158. In some embodiments, an oligonucleotide useful for targeting DMD (e.g., for exon skipping) is 20-30 (e.g., 20, 25, 30) nucleotides in length, and comprises a region of complementarity to a target sequence comprising at least 4 (e.g., 4, 5, 6, 7, or 8) consecutive nucleotides of an ESE as set forth in any one of SEQ ID NOs: 2096 and 2147-2158. In some embodiments, an oligonucleotide useful for targeting DMD (e.g., for exon skipping) is 20 nucleotides in length, and comprises a region of complementarity to a target sequence comprising at least 4 (e.g., 4, 5, 6, 7, or 8) consecutive nucleotides of an ESE as set forth in any one of SEQ ID NOs: 2096 and 2147-2158. In some embodiments, an oligonucleotide useful for targeting DMD (e.g., for exon skipping) is 30 nucleotides in length, and comprises a region of complementarity to a target sequence comprising at least 4 (e.g., 4, 5, 6, 7, or 8) consecutive nucleotides of an ESE as set forth in any one of SEQ ID NOs: 2096 and 2147-2158.

[0346] In some embodiments, the oligonucleotide comprises a region of complementarity to a target sequence comprising one or more full or partial ESEs of DMD exon 50. In some embodiments, the oligonucleotide comprises a region of complementarity to a target sequence comprising at least 4 (e.g., 4, 5, 6, 7, or 8) consecutive nucleotides of an ESE of DMD exon 50. In some embodiments, the oligonucleotide comprises a region of complementarity to a target sequence comprising one or more full or partial ESEs as set forth in SEQ ID NOs: 2096 and 2160-2177. In some embodiments, the oligonucleotide comprises a region of complementarity to a target sequence comprising at least 4 (e.g., 4, 5, 6, 7, or 8) consecutive nucleotides of an ESE as set forth in any one of SEQ ID NOs: 2096 and 2160-2177.

[0347] In some embodiments, the oligonucleotide comprises a region of complementarity to a target sequence comprising at least 6 (e.g., 6, 7, 8, 9, 10, 11, 12, 13, 14, 15, 16, 17, 18, 19, 20, or more) nucleotides of one or more ESEs (e.g., 2, 3, 4, or more adjacent ESEs) of DMD exon 50. In some embodiments, the oligonucleotide comprises a region of complementarity to a target sequence comprising at least 6 (e.g., 6, 7, 8, 9, 10, 11, 12, 13, 14, 15, 16, 17, 18, 19, 20, or more) nucleotides of one or more ESEs (e.g., 2, 3, 4, or more adjacent ESEs) as set forth in SEQ ID NOs: 2096 and 2160-2177.

[0348] In some embodiments, an oligonucleotide useful for targeting DMD (e.g., for exon skipping) is 18-35 nucleotides in length, and comprises a region of complementarity to a target sequence comprising at least 4 (e.g., 4, 5, 6, 7, or 8) consecutive nucleotides of an ESE as set forth in any one of SEQ ID NOs: 2096 and 2160-2177. In some embodiments, an oligonucleotide useful for targeting DMD (e.g., for exon skipping) is 20-30 (e.g., 20, 25, 30) nucleotides in length, and comprises a region of complementarity to a target sequence comprising at least 4 (e.g., 4, 5, 6, 7, or 8) consecutive nucleotides of an ESE as set forth in any one of SEQ ID NOs: 2096 and 2160-2177. In some embodiments, an oligonucleotide useful for targeting DMD (e.g., for exon skipping) is 20 nucleotides in length, and comprises a region of complementarity to a target sequence comprising at least 4 (e.g., 4, 5, 6, 7, or 8) consecutive nucleotides of an ESE as set forth in any one of SEQ ID NOs: 2096 and 2160-2177. In some embodiments, an oligonucleotide useful for targeting DMD (e.g., for exon skipping) is 30 nucleotides in length, and comprises a region of complementarity to a target sequence comprising at least 4 (e.g., 4, 5, 6, 7, or 8) consecutive nucleotides of an ESE as set forth in any one of SEQ ID NOs: 2096 and 2160-2177.

[0349] In some embodiments, the oligonucleotide comprises a region of complementarity to a target sequence comprising one or more full or partial ESEs of DMD exon 51. In some embodiments, the oligonucleotide comprises a region of complementarity to a target sequence comprising at least 4 (e.g., 4, 5, 6, 7, or 8) consecutive nucleotides of an ESE of DMD exon 51. In some embodiments, the oligonucleotide comprises a region of complementarity to a target sequence comprising one or more full or partial ESEs as set forth in SEQ ID NOs: 402-436. In some embodiments, the oligonucleotide comprises a region of complementarity to a target sequence comprising at least 4 (e.g., 4, 5, 6, 7, or 8) consecutive nucleotides of an ESE as set forth in any one of SEQ ID NOs: 402-436. In some embodiments, the oligonucleotide comprises a region of complementarity to a target sequence comprising at least 4 (e.g., 4, 5, 6, 7, 8) consecutive nucleotides of an ESE as set forth in SEQ ID NO: 419.

[0350] In some embodiments, the oligonucleotide comprises a region of complementarity to a target sequence comprising at least 6 (e.g., 6, 7, 8, 9, 10, 11, 12, 13, 14, 15, 16, 17, 18, 19, 20, or more) nucleotides of one or more ESEs (e.g., 2, 3, 4, or more adjacent ESEs) of DMD exon 51. In some embodiments, the oligonucleotide comprises a region of complementarity to a target sequence comprising at least 6 (e.g., 6, 7, 8, 9, 10, 11, 12, 13, 14, 15, 16, 17, 18, 19, 20, or more) nucleotides of one or more ESEs (e.g., 2, 3, 4, or more adjacent ESEs) as set forth in SEQ ID NOs: 402-436. In some embodiments, the oligonucleotide comprises a region of complementarity to a target sequence comprising at least 6 (e.g., 6, 7, 8, 9, 10, 11, 12, 13, or 14) nucleotides of ESEs as set forth in SEQ ID NO: 418 and SEQ ID NO: 419.

[0351] In some embodiments, an oligonucleotide useful for targeting DMD (e.g., for exon skipping) is 18-35 nucleotides in length, and comprises a region of complementarity to a target sequence comprising at least 4 (e.g., 4, 5, 6, 7, or 8) consecutive nucleotides of an ESE as set forth in any one of SEQ ID NOs: 402-436. In some embodiments, an oligonucleotide useful for targeting DMD (e.g., for exon skipping) is 20-30 (e.g., 20, 25, 30) nucleotides in length, and comprises a region of complementarity to a target sequence comprising at least 4 (e.g., 4, 5, 6, 7, or 8) consecutive nucleotides of an ESE as set forth in any one of SEQ ID NOs: 402-436. In some embodiments, an oligonucleotide useful for targeting DMD (e.g., for exon skipping) is 20 nucleotides in length, and comprises a region of complementarity to a target sequence comprising at least 4 (e.g., 4, 5, 6, 7, or 8) consecutive nucleotides of an ESE as set forth in any one of SEQ ID NOs: 402-436. In some embodiments, an oligonucleotide useful for targeting DMD (e.g., for exon skipping) is 30 nucleotides in length, and comprises a region of complementarity to a target sequence comprising at least 4 (e.g., 4, 5, 6, 7, or 8) consecutive nucleotides of an ESE as set forth in any one of SEQ ID NOs: 402-436.

[0352] In some embodiments, an oligonucleotide useful for targeting DMD (e.g., for exon skipping) is 20-30 (e.g., 20, 25, 30) nucleotides in length and comprises a region of complementarity to a target sequence comprising at least 4 (e.g., 4, 5, 6, 7, or 8) consecutive nucleotides of an ESE as set forth in SEQ ID NO: 419. In some embodiments, an oligonucleotide useful for targeting DMD (e.g., for exon skipping) is 30 nucleotides in length and comprises a region of complementarity to a target sequence comprising at least 4 (e.g., 4, 5, 6, 7, or 8) consecutive nucleotides of an ESE as set forth in SEQ ID NO: 419.

[0353] In some embodiments, the oligonucleotide is 20-30 (e.g., 20, 25, 30) nucleotides in length and comprises a region of complementarity to a target sequence comprising at least 6 (e.g., 6, 7, 8, 9, 10, 11, 12, 13, or 14) nucleotides of ESEs as set forth in SEQ ID NO: 418 and SEQ ID NO: 419. In some embodiments, the oligonucleotide is 30 nucleotides in length and comprises a region of complementarity to a target sequence comprising at least 6 (e.g., 6, 7, 8, 9, 10, 11, 12, 13, or 14) nucleotides of ESEs as set forth in SEQ ID NO: 418 and SEQ ID NO: 419.

[0354] Non-limiting examples of oligonucleotides that are useful for DMD exon 51 skipping and their target sequences are provided in SEQ ID NOs: 437-1241 and SEQ ID NOs: 1242-2046, respectively. In some embodiments, the oligonucleotide is 20-30 nucleotides in length and comprises a region of complementarity to a target sequence comprising at least 20 consecutive nucleotides of any one of SEQ ID NOs: 1242-2046. In some embodiments, the oligonucleotide is 20-30 nucleotides in length and comprises at least 20 consecutive nucleotides of any one of SEQ ID NOs: 437-1241. In some embodiments, the oligonucleotide comprises the nucleotide sequence of any one of SEQ ID NOs: 437-1241. In some embodiments, the oligonucleotide is at least 30 nucleotides (e.g., 30, 31, 32, 33, 34, or 35) in length and comprises the nucleotide sequence of any one of SEQ ID NOs: 437-1241.

[0355] In some embodiments, the oligonucleotide is 20-30 nucleotides in length and comprises a region of complementarity to a target sequence comprising at least 20 consecutive nucleotides of any one of SEQ ID NOs: 1548, 1550, 1551, 1552, 1555, 1558, 1559, 1562, 1565, 1569, 1577, 1583, 1589, 1595, 1600, 1606, 1610, 1614, 1621, 1626, 1629, 1632, 1637, 1640, 1643, 1646, 1650, 1655, 1658, and 1662. In some embodiments, the oligonucleotide is 20-30 nucleotides in length and comprises at least 20 consecutive nucleotides of any one of SEQ ID NO: 743, 745, 746, 747, 750, 753, 754, 757, 760, 764, 772, 778, 784, 790, 795, 801, 805, 809, 816, 821, 824, 827, 832, 835, 838, 841, 845, 850, 853, and 857. In some embodiments, the oligonucleotide comprises the nucleotide sequence of any one of SEQ ID NOs: 743, 745, 746, 747, 750, 753, 754, 757, 760, 764, 772, 778, 784, 790, 795, 801, 805, 809, 816, 821, 824, 827, 832, 835, 838, 841, 845, 850, 853, and 857. In some embodiments, the oligonucleotide is 30 nucleotides in length and comprises the nucleotide sequence of any one of SEQ ID NOs: 743, 745, 746, 747, 750, 753, 754, 757, 760, 764, 772, 778, 784, 790, 795, 801, 805, 809, 816, 821, 824, 827, 832, 835, 838, 841, 845, 850, 853, and 857.

[0356] In some embodiments, the oligonucleotide comprises a region of complementarity to a target sequence comprising one or more full or partial ESEs of DMD exon 52. In some embodiments, the oligonucleotide comprises a region of complementarity to a target sequence comprising at least 4 (e.g., 4, 5, 6, 7, or 8) consecutive nucleotides of an ESE of DMD exon 52. In some embodiments, the oligonucleotide comprises a region of complementarity to a target sequence comprising one or more full or partial ESEs as set forth in SEQ ID NOs: 432 and 2178-2192. In some embodiments, the oligonucleotide comprises a region of complementarity to a target sequence comprising at least 4 (e.g., 4, 5, 6, 7, or 8) consecutive nucleotides of an ESE as set forth in any one of SEQ ID NOs: 432 and 2178-2192.

[0357] In some embodiments, the oligonucleotide comprises a region of complementarity to a target sequence comprising at least 6 (e.g., 6, 7, 8, 9, 10, 11, 12, 13, 14, 15, 16, 17, 18, 19, 20, or more) nucleotides of one or more ESEs (e.g., 2, 3, 4, or more adjacent ESEs) of DMD exon 52. In some embodiments, the oligonucleotide comprises a region of complementarity to a target sequence comprising at least 6 (e.g., 6, 7, 8, 9, 10, 11, 12, 13, 14, 15, 16, 17, 18, 19, 20, or more) nucleotides of one or more ESEs (e.g., 2, 3, 4, or more adjacent ESEs) as set forth in SEQ ID NOs: 432 and 2178-2192.

[0358] In some embodiments, an oligonucleotide useful for targeting DMD (e.g., for exon skipping) is 18-35 nucleotides in length, and comprises a region of complementarity to a target sequence comprising at least 4 (e.g., 4, 5, 6, 7, or 8) consecutive nucleotides of an ESE as set forth in any one of SEQ ID NOs: 432 and 2178-2192. In some embodiments, an oligonucleotide useful for targeting DMD (e.g., for exon skipping) is 20-30 (e.g., 20, 25, 30) nucleotides in length, and comprises a region of complementarity to a target sequence comprising at least 4 (e.g., 4, 5, 6, 7, or 8) consecutive nucleotides of an ESE as set forth in any one of SEQ ID NOs: 432 and 2178-2192. In some embodiments, an oligonucleotide useful for targeting DMD (e.g., for exon skipping) is 20 nucleotides in length, and comprises a region of complementarity to a target sequence comprising at least 4 (e.g., 4, 5, 6, 7, or 8) consecutive nucleotides of an ESE as set forth in any one of SEQ ID NOs: 432 and 2178-2192. In some embodiments, an oligonucleotide useful for targeting DMD (e.g., for exon skipping) is 30 nucleotides in length, and comprises a region of complementarity to a target sequence comprising at least 4 (e.g., 4, 5, 6, 7, or 8) consecutive nucleotides of an ESE as set forth in any one of SEQ ID NOs: 432 and 2178-2192.

[0359] In some embodiments, the oligonucleotide comprises a region of complementarity to a target sequence comprising one or more full or partial ESEs of DMD exon 53. In some embodiments, the oligonucleotide comprises a region of complementarity to a target sequence comprising at least 4 (e.g., 4, 5, 6, 7, or 8) consecutive nucleotides of an ESE of DMD exon 53. In some embodiments, the oligonucleotide comprises a region of complementarity to a target sequence comprising one or more full or partial ESEs as set forth in SEQ ID NOs: 416, 430, 431, 2108, 2114, 2127, and 2193-2213. In some embodiments, the oligonucleotide comprises a region of complementarity to a target sequence comprising at least 4 (e.g., 4, 5, 6, 7, or 8) consecutive nucleotides of an ESE as set forth in any one of SEQ ID NOs: 416, 430, 431, 2108, 2114, 2127, and 2193-2213.

[0360] In some embodiments, the oligonucleotide comprises a region of complementarity to a target sequence comprising at least 6 (e.g., 6, 7, 8, 9, 10, 11, 12, 13, 14, 15, 16, 17, 18, 19, 20, or more) nucleotides of one or more ESEs (e.g., 2, 3, 4, or more adjacent ESEs) of DMD exon 53. In some embodiments, the oligonucleotide comprises a region of complementarity to a target sequence comprising at least 6 (e.g., 6, 7, 8, 9, 10, 11, 12, 13, 14, 15, 16, 17, 18, 19, 20, or more) nucleotides of one or more ESEs (e.g., 2, 3, 4, or more adjacent ESEs) as set forth in SEQ ID NOs: 416, 430, 431, 2108, 2114, 2127, and 2193-2213.

[0361] In some embodiments, an oligonucleotide useful for targeting DMD (e.g., for exon skipping) is 18-35 nucleotides in length, and comprises a region of complementarity to a target sequence comprising at least 4 (e.g., 4, 5, 6, 7, or 8) consecutive nucleotides of an ESE as set forth in any one of SEQ ID NOs: 416, 430, 431, 2108, 2114, 2127, and 2193-2213. In some embodiments, an oligonucleotide useful for targeting DMD (e.g., for exon skipping) is 20-30 (e.g., 20, 25, 30) nucleotides in length, and comprises a region of complementarity to a target sequence comprising at least 4 (e.g., 4, 5, 6, 7, or 8) consecutive nucleotides of an ESE as set forth in any one of SEQ ID NOs: 416, 430, 431, 2108, 2114, 2127, and 2193-2213. In some embodiments, an oligonucleotide useful for targeting DMD (e.g., for exon skipping) is 20 nucleotides in length, and comprises a region of complementarity to a target sequence comprising at least 4 (e.g., 4, 5, 6, 7, or 8) consecutive nucleotides of an ESE as set forth in any one of SEQ ID NOs: 416, 430, 431, 2108, 2114, 2127, and 2193-2213. In some embodiments, an oligonucleotide useful for targeting DMD (e.g., for exon skipping) is 30 nucleotides in length, and comprises a region of complementarity to a target sequence comprising at least 4 (e.g., 4, 5, 6, 7, or 8) consecutive nucleotides of an ESE as set forth in any one of SEQ ID NOs: 416, 430, 431, 2108, 2114, 2127, and 2193-2213.

[0362] In some embodiments, the oligonucleotide comprises a region of complementarity to a target sequence comprising one or more full or partial ESEs of DMD exon 55. In some embodiments, the oligonucleotide comprises a region of complementarity to a target sequence comprising at least 4 (e.g., 4, 5, 6, 7, or 8) consecutive nucleotides of an ESE of DMD exon 55. In some embodiments, the oligonucleotide comprises a region of complementarity to a target sequence comprising one or more full or partial ESEs as set forth in SEQ ID NOs: 2097, 2102, 2103, 2116, 2147, 2199, and 2214-2238. In some embodiments, the oligonucleotide comprises a region of complementarity to a target sequence comprising at least 4 (e.g., 4, 5, 6, 7, or 8) consecutive nucleotides of an ESE as set forth in any one of SEQ ID NOs: 2097, 2102, 2103, 2116, 2147, 2199, and 2214-2238.

[0363] In some embodiments, the oligonucleotide comprises a region of complementarity to a target sequence comprising at least 6 (e.g., 6, 7, 8, 9, 10, 11, 12, 13, 14, 15, 16, 17, 18, 19, 20, or more) nucleotides of one or more ESEs (e.g., 2, 3, 4, or more adjacent ESEs) of DMD exon 55. In some embodiments, the oligonucleotide comprises a region of complementarity to a target sequence comprising at least 6 (e.g., 6, 7, 8, 9, 10, 11, 12, 13, 14, 15, 16, 17, 18, 19, 20, or more) nucleotides of one or more ESEs (e.g., 2, 3, 4, or more adjacent ESEs) as set forth in SEQ ID NOs: 2097, 2102, 2103, 2116, 2147, 2199, and 2214-2238.

[0364] In some embodiments, an oligonucleotide useful for targeting DMD (e.g., for exon skipping) is 18-35 nucleotides in length, and comprises a region of complementarity to a target sequence comprising at least 4 (e.g., 4, 5, 6, 7, or 8) consecutive nucleotides of an ESE as set forth in any one of SEQ ID NOs: 2097, 2102, 2103, 2116, 2147, 2199, and 2214-2238. In some embodiments, an oligonucleotide useful for targeting DMD (e.g., for exon skipping) is 20-30 (e.g., 20, 25, 30) nucleotides in length, and comprises a region of complementarity to a target sequence comprising at least 4 (e.g., 4, 5, 6, 7, or 8) consecutive nucleotides of an ESE as set forth in any one of SEQ ID NOs: 2097, 2102, 2103, 2116, 2147, 2199, and 2214-2238. In some embodiments, an oligonucleotide useful for targeting DMD (e.g., for exon skipping) is 20 nucleotides in length, and comprises a region of complementarity to a target sequence comprising at least 4 (e.g., 4, 5, 6, 7, or 8) consecutive nucleotides of an ESE as set forth in any one of SEQ ID NOs: 2097, 2102, 2103, 2116, 2147, 2199, and 2214-2238. In some embodiments, an oligonucleotide useful for targeting DMD (e.g., for exon skipping) is 30 nucleotides in length, and comprises a region of complementarity to a target sequence comprising at least 4 (e.g., 4, 5, 6, 7, or 8) consecutive nucleotides of an ESE as set forth in any one of SEQ ID NOs: 2097, 2102, 2103, 2116, 2147, 2199, and 2214-2238.

[0365] In some embodiments, any one of the oligonucleotides useful for targeting DMD (e.g., for exon skipping) is a phosphorodiamidate morpholino oligomer (PMO).

[0366] Additional examples of oligonucleotides targeting DMD (e.g., for exon skipping) are provided in U.S. Patent Application Publication 2013-072541, published Mar. 21, 2013, entitled “ADENO-ASSOCIATED VIRAL VECTOR FOR EXON SKIPPING IN A GENE ENCODING A DISPENSIBLE-DOMAIN PROTEIN”; U.S. Patent Application Publication 2015-191725, published Jul. 9, 2015, entitled “OLIGONUCLEOTIDE FOR THE TREATMENT OF MUSCULAR DYSTROPHY PATIENTS”; U.S. Patent Application Publication 2015-196670, published Jul. 16, 2015, entitled “COMPOSITIONS AND METHODS FOR DUCHENNE MUSCULAR DYSTROPHY GENE THERAPY”; U.S. Patent Application Publication 2017-349905, published Dec. 7, 2017, entitled “GENOME EDITING WITH SPLIT CAS9 EXPRESSED FROM TWO VECTORS”; U.S. Patent Application Publication 2018-028554, published Feb. 1, 2018, entitled “OLIGOMERS HAVING BICYCLIC SCAFFOLD MOEITIES”; U.S. Patent Application Publication 2018-171333, published Jun. 21, 2018, entitled “ANTISENSE MOLECULES AND METHODS FOR TREATING PATHOLOGIES”; U.S. Patent Application Publication 2018-179538, published Jun. 28, 2018, entitled “ANTISENSE NUCLEIC ACIDS”; U.S. Patent Application Publication 2018-265859, published Sep. 20, 2018, entitled “MODIFICATION OF THE DYSTROPHIN GENE AND USES THEREOF”; U.S. Patent Application Publication 2018-369400, published Dec. 27, 2018, entitled “NUCLEIC ACID-POLYPEPTIDE COMPOSITIONS AND METHODS OF INDUCING EXON SKIPPING”; U.S. Patent Application Publication 2019-000986, published Jan. 3, 2019, entitled “NUCLEIC ACID-POLYPEPTIDE COMPOSITIONS AND METHODS OF INDUCING EXON SKIPPING”; U.S. Patent Application Publication 2019-008986, published Jan. 10, 2019, entitled “OLIGONUCLEOTIDE COMPOSITIONS AND METHODS THEREOF”; U.S. Patent Application Publication 2019-112604, published Apr. 18, 2019, entitled “METHODS AND MEANS FOR EFFICIENT SKIPPING OF EXON 45 IN DUCHENNE MUSCULAR DYSTROPHY PRE-MRNA”; U.S. Patent Application Publication 2019-119679, published Apr. 25, 2019, entitled “METHODS AND MEANS FOR EFFICIENT SKIPPING OF EXON 45 IN DUCHENNE MUSCULAR DYSTROPHY PRE-MRNA”; U.S. Patent Application Publication 2019-127733, published May 2, 2019, entitled “OLIGONUCLEOTIDE COMPOSITIONS AND METHODS THEREOF”; U.S. Patent Application Publication 2019-151476, published May 23, 2019, entitled “THERAPEUTIC APPLICATIONS OF CPF1-BASED GENOME EDITING”; U.S. Patent Application Publication 2019-177723, published Jun. 13, 2019, entitled “COMPOSITIONS AND METHODS FOR TREATING DUCHENNE MUSCULAR DYSTROPHY AND RELATED DISORDERS”; U.S. Patent Application Publication 2019-177725, published Jun. 13, 2019, entitled “METHODS AND MEANS FOR EFFICIENT SKIPPING OF EXON 45 IN DUCHENNE MUSCULAR DYSTROPHY PRE-MRNA”; U.S. Patent Application Publication 2019-209604, published Jul. 11, 2019, entitled “OLIGONUCLEOTIDES, COMPOSITIONS AND METHODS THEREOF”; U.S. Patent Application Publication 2019-249173, published Aug. 15, 2019, entitled “METHODS AND COMPOSITIONS OF BIOLOGICALLY ACTIVE AGENTS”; U.S. Patent Application Publication 2019-270994, published Sep. 5, 2019, entitled “ANTISENSE MOLECULES AND METHODS FOR TREATING PATHOLOGIES”; U.S. Patent Application Publication 2019-284556, published Sep. 19, 2019, entitled “MULTIPLE EXON SKIPPING COMPOSITIONS FOR DMD”; U.S. Patent Application Publication 2019-323010, published Oct. 24, 2019, entitled “ANTISENSE OLIGONUCLEOTIDES FOR INDUCING EXON SKIPPING AND METHODS OF USE THEREOF”; U.S. Patent Application Publication 2019-330626, published Oct. 31, 2019, entitled “COMPOUNDS AND METHODS FOR USE IN DYSTROPHIN TRANSCRIPT”; U.S. Patent Application Publication 2019-338311, published Nov. 7, 2019, entitled “OPTIMIZED STRATEGY FOR EXON SKIPPING MODIFICATIONS USING CRISPR/CAS9 WITH TRIPLE GUIDE SEQUENCES”; U.S. Patent Application Publication 2019-359982, published Nov. 28, 2019, entitled “COMPOSITIONS FOR TREATING MUSCULAR DYSTROPHY”; U.S. Patent Application Publication 2019-364862, published Dec. 5, 2019, entitled “DMD REPORTER MODELS CONTAINING HUMANIZED DUCHENNE MUSCULAR DYSTROPHY MUTATIONS”; U.S. Patent Application Publication 2019-390197, published Dec. 26, 2019, entitled “OLIGONUCLEOTIDE COMPOSITIONS AND METHODS THEREOF”; U.S. Patent Application Publication 2020-040337, published Feb. 6, 2020, entitled “COMPOSITIONS FOR TREATING MUSCULAR DYSTROPHY”; U.S. Pat. No. 10,287,586, issued May 14, 2019, entitled “ANTISENSE MOLECULES AND METHODS FOR TREATING PATHOLOGIES”; U.S. Pat. No. 10,337,003, issued Jul. 2, 2019, entitled “COMPOSITIONS FOR TREATING MUSCULAR DYSTROPHY”; U.S. Pat. No. 10,364,431, issued Jul. 30, 2019, entitled “COMPOSITIONS FOR TREATING MUSCULAR DYSTROPHY”; U.S. Pat. No. 10,450,568, issued Oct. 22, 2019, entitled “OLIGONUCLEOTIDE COMPOSITIONS AND METHODS THEREOF”; U.S. Pat. No. 10,487,106, issued Nov. 26, 2019, entitled “ANTISENSE NUCLEIC ACIDS”; U.S. Pat. No. 10,533,171, issued Jan. 14, 2020, entitled “OLIGONUCLEOTIDE COMPRISING AN INOSINE FOR TREATING DMD”; U.S. Pat. No. 10,704,060, issued Jul. 7, 2020, entitled “RNA-GUIDED GENE EDITING AND GENE REGULATION”; U.S. Pat. No. 10,752,898, issued Aug. 25, 2020, entitled “EFFECTIVE GENE THERAPY TOOLS FOR DYSTROPHIN EXON 53 SKIPPING”; U.S. Pat. No. 10,876,114, issued Dec. 29, 2020, entitled “METHODS AND MEANS FOR EFFICIENT SKIPPING OF AT LEAST ONE OF THE FOLLOWING EXONS OF THE HUMAN DUCHENNE MUSCULAR DYSTROPHY GENE: 43, 46, 50-53”; U.S. Pat. No. 6,100,099, issued Aug. 8, 2000, entitled “TEST STRIP HAVING A DIAGONAL ARRAY OF CAPTURE SPOTS”; U.S. Pat. No. 6,210,898, issued Apr. 3, 2001, entitled “METHOD OF PERFORMING IMMUNOCHROMATOGRAPHY”; U.S. Pat. No. 7,973,015, issued Jul. 5, 2011, entitled “INDUCTION OF EXON SKIPPING IN EUKARYOTIC CELLS”; U.S. Pat. No. 8,039,608, issued Oct. 18, 2011, entitled “BIOINFORMATICALLY DETECTABLE GROUP OF NOVEL REGULATORY GENES AND USES THEREOF”; U.S. Pat. No. 8,361,979, issued Jan. 29, 2013, entitled “MEANS AND METHOD FOR INDUCING EXON-SKIPPING”; U.S. Pat. No. 8,802,437, issued Aug. 12, 2014, entitled “MEGANUCLEASE REAGENTS OF USES THEREOF FOR TREATING GENETIC DISEASES CAUSED BY FRAME SHIFT/NON SENSE MUTATIONS”; U.S. Pat. No. 8,865,883, issued Oct. 21, 2014, entitled “MULTIPLE EXON SKIPPING COMPOSITIONS FOR DMD”; U.S. Pat. No. 9,657,049, issued May 23, 2017, entitled “ENA NUCLEIC ACID PHARMACEUTICALS CAPABLE OF MODIFYING SPLICING OF MRNA PRECURSORS”; U.S. Pat. No. 9,657,050, issued May 23, 2017, entitled “ENA NUCLEIC ACID PHARMACEUTICALS CAPABLE OF MODIFYING SPLICING OF MRNA PRECURSORS”; U.S. Pat. No. 9,988,629, issued Jun. 5, 2018, entitled “ANTISENSE NUCLEIC ACIDS”; International Patent Publication WO 2011/078797 A2, published Jun. 30, 2011, entitled “ANTISENSE OLIGONUCLEOTIDES AND USES THREREOF”; International Patent Publication WO 2011/154427 A1, published Dec. 15, 2011, entitled “MODIFIED SNRNAS FOR USE IN THERAPY”; International Patent Publication WO 2018/007475 A1, published Jan. 11, 2018, entitled “PRE-MRNA SPLICE SWITCHING OR MODULATING OLIGONUCLEOTIDES COMPRISING BICYCLIC SCAFFOLD MOIETIES, WITH IMPROVED CHARACTERISTICS FOR THE TREATMENT OF GENETIC DISORDERS”; International Patent Publication WO 2018/014042 A1, published Jan. 18, 2018, entitled “COMPOUNDS AND METHODS FOR MODULATION OF DYSTROPHIN TRANSCRIPT”; International Patent Publication WO 2018/017754 A1, published Jan. 25, 2018, entitled “THERAPEUTIC APPLICATIONS OF CPF1-BASED GENOME EDITING”; International Patent Publication WO 2018/107003 A1, published Jun. 14, 2018, entitled “DMD REPORTER MODELS CONTAINING HUMANIZED DUSCHENE MUSCULAR DYSTROPHY MUTATIONS”; International Patent Publication WO 2018/129296 A1, published Jul. 12, 2018, entitled “OPTIMIZED STRATEGY FOR EXON SKIPPING MODIFICATIONS USING CRISPR/CAS9 WITH TRIPLE GUIDE SEQUENCES”; International Patent Publication WO 2019/014772 A1, published Jan. 24, 2019, entitled “ANTISENSE OLIGONUCLEOTIDES THAT BIND TO EXON 51 OF HUMAN DYSTROPHIN PRE-MRNA”; International Patent Publication WO 2019/059973 A1, published Mar. 28, 2019, entitled “EXON SKIPPING OLIGOMER CONJUGATES FOR MUSCULAR DYSTROPHY”; International Patent Publication WO 2019/060775 A1, published Mar. 28, 2019, entitled “NUCLEIC ACID-POLYPEPTIDE COMPOSITIONS AND METHODS OF INDUCING EXON SKIPPING”; International Patent Publication WO 2019/067975 A1, published Apr. 4, 2019, entitled “COMBINATION THERAPIES FOR TREATING MUSCULAR DYSTROPHY”; International Patent Publication WO 2019/092507 A2, published May 16, 2019, entitled “CRISPR/CAS SYSTEMS FOR TREATMENT OF DMD”; International Patent Publication WO 2019/136216 A1, published Jul. 11, 2019, entitled “THERAPEUTIC CRISPR/CAS9 COMPOSITIONS AND METHODS OF USE”; International Patent Publication WO 2019/152609 A1, published Aug. 8, 2019, entitled “COMPOSITIONS AND METHODS FOR CORRECTING DYSTROPHIN MUTATIONS IN HUMAN CARDIOMYOCYTES”; International Patent Publication WO 2019/200185 A1, published Oct. 17, 2019, entitled “OLIGONUCLEOTIDE COMPOSITIONS AND METHODS OF USE THEREOF”; International Patent Publication WO 2019/215333 A1, published Nov. 14, 2019, entitled “OLIGONUCLEOTIDES CONJUGATES COMPRISING 7′-5′-ALPHA-ANOMERIC-BICYCLIC SUGAR NUCLEOSIDES”; International Patent Publication WO 2019/241385 A2, published Dec. 19, 2019, entitled “EXON SKIPPING OLIGOMERS FOR MUSCULAR DYSTROPY”; International Patent Publication WO 2019/246480 A1, published Dec. 26, 2019, entitled “CORRECTION OF DYSTROPHIN EXON 43, EXON 45, OR EXON 52 DELETIONS IN DUCHENNE MUSCULAR DYSTROPHY”; International Patent Publication WO 2020/028832 A1, published Feb. 6, 2020, entitled “MUSCLE TARGETING COMPLEXES AND USES THEREOF FOR TREATING DYSTROPHINOPATHIES”; International Patent Publication WO 2018/091544 A1, published May 24, 2018, entitled “SUBSTANCES FOR TARGETING VARIOUS SELECTED ORGANS OR TISSUES”; International Patent Publication WO 2018/098480 A1, published May 31, 2018, entitled “PREVENTION OF MUSCULAR DYSTROPHY BY CRISPR/CPF1-MEDIATED GENE EDITING”; International Patent Publication WO 1993/020227 A1, published Oct. 14, 1993, entitled “METHOD OF MULTIPLEX LIGASE CHAIN REACTION”; International Patent Publication WO 2013/100190 A1, published Jul. 4, 2013, entitled “ANTISENSE NUCLEIC ACID”; International Patent Publication WO 2013/163628 A2, published Oct. 31, 2013, entitled “GENETIC CORRECTION OF MUTATED GENES”; International Patent Publication WO 2007/135105 A1, published Nov. 29, 2007, entitled “MEANS AND METHOD FOR INDUCING EXON-SKIPPING”; International Patent Publication WO 2011/150408 A2, published Dec. 1, 2011, entitled “OLIGONUCLEOTIDE ANALOGUES HAVING MODIFIED INTERSUBUNIT LINKAGES AND/OR TERMINAL GROUPS”; International Patent Publication WO 2012/029986 A1, published Mar. 8, 2012, entitled “ANTISENSE NUCLEIC ACID”; the contents of each of which are incorporated herein in their entireties.

[0367] Examples of oligonucleotides for promoting DMD gene editing include International Patent Publication WO2018053632A1, published Mar. 29, 2018, entitled “METHODS OF MODIFYING THE DYSTROPHIN GENE AND RESTORING DYSTROPHIN EXPRESSION AND USES THEREOF”; International Patent Publication WO2017049407A1, published Mar. 30, 2017, entitled “MODIFICATION OF THE DYSTROPHIN GENE AND USES THEREOF”; International Patent Publication WO2016161380A1, published Oct. 6, 2016, entitled “CRISPR/CAS-RELATED METHODS AND COMPOSITIONS FOR TREATING DUCHENNE MUSCULAR DYSTROPHY AND BECKER MUSCULAR DYSTROPHY”; International Patent Publication WO2017095967, published Jun. 8, 2017, entitled “THERAPEUTIC TARGETS FOR THE CORRECTION OF THE HUMAN DYSTROPHIN GENE BY GENE EDITING AND METHODS OF USE”; International Patent Publication WO2017072590A1, published May 4, 2017, entitled “MATERIALS AND METHODS FOR TREATMENT OF DUCHENNE MUSCULAR DYSTROPHY”; International Patent Publication WO2018098480A1, published May 31, 2018, entitled “PREVENTION OF MUSCULAR DYSTROPHY BY CRISPR/CPF1-MEDIATED GENE EDITING”; US Patent Application Publication US20170266320A1, published Sep. 21, 2017, entitled “RNA-Guided Systems for In Vivo Gene Editing”; International Patent Publication WO2016025469A1, published Feb. 18, 2016, entitled “PREVENTION OF MUSCULAR DYSTROPHY BY CRISPR/CAS9-MEDIATED GENE EDITING”; U.S. Patent Application Publication 2016/0201089, published Jul. 14, 2016, entitled “RNA-GUIDED GENE EDITING AND GENE REGULATION”; and U.S. Patent Application Publication 2013/0145487, published Jun. 6, 2013, entitled “MEGANUCLEASE VARIANTS CLEAVING A DNA TARGET SEQUENCE FROM THE DYSTROPHN GENE AND USES THEREOF”, the contents of each of which are incorporated herein in their entireties. In some embodiments, an oligonucleotide may have a region of complementarity to DMD gene sequences of multiple species, e.g., selected from human, mouse and non-human species.

[0368] In some embodiments, the oligonucleotide may have region of complementarity to a mutant DMD allele, for example, a DMD allele with at least one mutation in any of exons 1-79 of DMD in humans that leads to a frameshift and improper RNA splicing/processing.

[0369] In some embodiments, the oligonucleotide may target lncRNA or mRNA, e.g., for degradation. In some embodiments, the oligonucleotide may target, e.g., for degradation, a nucleic acid encoding a protein involved in a mismatch repair pathway, e.g., MSH2, MutLalpha, MutSbeta, MutLalpha. Non-limiting examples of proteins involved in mismatch repair pathways, for which mRNAs encoding such proteins may be targeted by oligonucleotides described herein, are described in Iyer, R. R. et al., “DNA triplet repeat expansion and mismatch repair” Annu Rev Biochem. 2015; 84:199-226.; and Schmidt M. H. and Pearson C. E., “Disease-associated repeat instability and mismatch repair” DNA Repair (Amst). 2016 February;38:117-26.

[0370] In some embodiments, any one of the oligonucleotides can be in salt form, e.g., as sodium, potassium, or magnesium salts.

[0371] In some embodiments, the 5′ or 3′ nucleoside (e.g., terminal nucleoside) of any one of the oligonucleotides described herein is conjugated to an amine group, optionally via a spacer. In some embodiments, the spacer comprises an aliphatic moiety. In some embodiments, the spacer comprises a polyethylene glycol moiety. In some embodiments, a phosphodiester linkage is present between the spacer and the 5′ or 3′ nucleoside of the oligonucleotide. In some embodiments, the 5′ or 3′ nucleoside (e.g., terminal nucleoside) of any of the oligonucleotides described herein is conjugated to a spacer that is a substituted or unsubstituted aliphatic, substituted or unsubstituted heteroaliphatic, substituted or unsubstituted carbocyclylene, substituted or unsubstituted heterocyclylene, substituted or unsubstituted arylene, substituted or unsubstituted heteroarylene, —O—, —N(R^{A})—, —S—, —C(═O)—, —C(═O)O—, —C(═O)NR^{A}—, —NR^{A}C(═O)—, —NR^{A}C(═O)R^{A}—, —C(═O)R^{A}—, —NR^{A}C(═O)O—, —NR^{A}C(═O)N(R^{A})—, —OC(═O)—, —OC(═O)O—, —OC(═O)N(R^{A})—, —S(O)₂NR^{A}—, —NR^{A}S(O)₂—, or a combination thereof; each R^{A} is independently hydrogen or substituted or unsubstituted alkyl. In certain embodiments, the spacer is a substituted or unsubstituted alkylene, substituted or unsubstituted heterocyclylene, substituted or unsubstituted heteroarylene, —O—, —N(R^{A})—, or —C(═O)N(R^{A})₂, or a combination thereof.

[0372] In some embodiments, the 5′ or 3′ nucleoside of any one of the oligonucleotides described herein is conjugated to a compound of the formula —NH₂—(CH₂)ₙ—, wherein n is an integer from 1 to 12. In some embodiments, n is 6, 7, 8, 9, 10, 11, or 12. In some embodiments, a phosphodiester linkage is present between the compound of the formula NH₂—(CH₂)ₙ— and the 5′ or 3′ nucleoside of the oligonucleotide. In some embodiments, a compound of the formula NH₂—(CH₂)₆— is conjugated to the oligonucleotide via a reaction between 6-amino-1-hexanol (NH₂—(CH₂)₆—OH) and the 5′ phosphate of the oligonucleotide.

[0373] In some embodiments, the oligonucleotide is conjugated to a targeting agent, e.g., a muscle targeting agent such as an anti-TfR antibody, e.g., via the amine group.

[0374] a. Oligonucleotide Size/Sequence

[0375] Oligonucleotides may be of a variety of different lengths, e.g., depending on the format. In some embodiments, an oligonucleotide is 7, 8, 9, 10, 11, 12, 13, 14, 15, 16, 17, 18, 19, 20, 21, 22, 23, 24, 25, 26, 27, 28, 29, 30, 35, 40, 45, 50, 75, or more nucleotides in length. In some embodiments, the oligonucleotide is 8 to 50 nucleotides in length, 8 to 40 nucleotides in length, 8 to 30 nucleotides in length, 10 to 15 nucleotides in length, 10 to 20 nucleotides in length, 15 to 25 nucleotides in length, 21 to 23 nucleotides in lengths, etc.

[0376] In some embodiments, a complementary nucleic acid sequence of an oligonucleotide for purposes of the present disclosure is specifically hybridizable or specific for the target nucleic acid when binding of the sequence to the target molecule (e.g., mRNA) interferes with the function of the target (e.g., mRNA) to cause a change of activity (e.g., inhibiting translation, altering splicing, exon skipping) or expression (e.g., degrading a target mRNA) and there is a sufficient degree of complementarity to avoid non-specific binding of the sequence to non-target sequences under conditions in which avoidance of non-specific binding is desired, e.g., under physiological conditions in the case of in vivo assays or therapeutic treatment, and in the case of in vitro assays, under conditions in which the assays are performed under suitable conditions of stringency. Thus, in some embodiments, an oligonucleotide may be at least 80%, at least 85%, at least 90%, at least 91%, at least 92%, at least 93%, at least 94%, at least 95%, at least 96%, at least 97%, at least 98%, at least 99% or 100% complementary to the consecutive nucleotides of a target nucleic acid. In some embodiments a complementary nucleotide sequence need not be 100% complementary to that of its target to be specifically hybridizable or specific for a target nucleic acid.

[0377] In some embodiments, an oligonucleotide comprises region of complementarity to a target nucleic acid that is in the range of 8 to 15, 8 to 30, 8 to 40, or 10 to 50, or 5 to 50, or 5 to 40 nucleotides in length. In some embodiments, a region of complementarity of an oligonucleotide to a target nucleic acid is 5, 6, 7, 8, 9, 10, 11, 12, 13, 14, 15, 16, 17, 18, 19, 20, 21, 22, 23, 24, 25, 26, 27, 28, 29, 30, 31, 32, 33, 34, 35, 36, 37, 38, 39, 40, 41, 42, 43, 44, 45, 46, 47, 48, 49, or 50 nucleotides in length. In some embodiments, the region of complementarity is complementary with at least 8 consecutive nucleotides of a target nucleic acid. In some embodiments, an oligonucleotide may contain 1, 2 or 3 base mismatches compared to the portion of the consecutive nucleotides of target nucleic acid. In some embodiments the oligonucleotide may have up to 3 mismatches over 15 bases, or up to 2 mismatches over 10 bases.

[0378] In some embodiments, the oligonucleotide is complementary (e.g., at least 85% at least 90%, at least 95%, or 100%) to a target sequence of the any one of the oligonucleotides described herein (e.g., the oligonucleotides listed in Table 14). In some embodiments, the oligonucleotide is complementary (e.g., at least 85% at least 90%, at least 95%, or 100%) to a target sequence of the any one of the oligonucleotides provided by SEQ ID NO: 437-1241. In some embodiments, such target sequence is 100% complementary to an oligonucleotide listed in Table 14. In some embodiments, such target sequence is 100% complementary to an oligonucleotide provided by SEQ ID NO: 437-1241. In some embodiments, the oligonucleotide is complementary (e.g., at least 85% at least 90%, at least 95%, or 100%) to a target sequence provided herein (e.g., a target sequence of any one of the oligonucleotides listed in Table 14). In some embodiments, the oligonucleotide is complementary (e.g., at least 85% at least 90%, at least 95%, or 100%) to a target sequence of any one of the oligonucleotides provided by SEQ ID NO: 1242-2046.

[0379] In some embodiments, any one or more of the thymine bases (T's) in any one of the oligonucleotides provided herein (e.g., the oligonucleotides listed in Table 14) may optionally be uracil bases (U's), and/or any one or more of the U's in the oligonucleotides provided herein may optionally be T's. In some embodiments, any one or more of the thymine bases (T's) in any one of the oligonucleotides provided by SEQ ID NOs: 437-1241 or in an oligonucleotide complementary to any one of SEQ ID NOs: 1242-2046 may optionally be uracil bases (U's), and/or any one or more of the U's in the oligonucleotides may optionally be T's.

[0380] b. Oligonucleotide Modifications:

[0381] The oligonucleotides described herein may be modified, e.g., comprise a modified sugar moiety, a modified internucleoside linkage, a modified nucleotide and/or (e.g., and) combinations thereof. In addition, in some embodiments, oligonucleotides may exhibit one or more of the following properties: do not mediate alternative splicing; are not immune stimulatory; are nuclease resistant; have improved cell uptake compared to unmodified oligonucleotides; are not toxic to cells or mammals; have improved endosomal exit internally in a cell; minimizes TLR stimulation; or avoid pattern recognition receptors. Any of the modified chemistries or formats of oligonucleotides described herein can be combined with each other. For example, one, two, three, four, five, or more different types of modifications can be included within the same oligonucleotide.

[0382] In some embodiments, certain nucleotide modifications may be used that make an oligonucleotide into which they are incorporated more resistant to nuclease digestion than the native oligodeoxynucleotide or oligoribonucleotide molecules; these modified oligonucleotides survive intact for a longer time than unmodified oligonucleotides. Specific examples of modified oligonucleotides include those comprising modified backbones, for example, modified internucleoside linkages such as phosphorothioates, phosphotriesters, methyl phosphonates, short chain alkyl or cycloalkyl intersugar linkages or short chain heteroatomic or heterocyclic intersugar linkages. Accordingly, oligonucleotides of the disclosure can be stabilized against nucleolytic degradation such as by the incorporation of a modification, e.g., a nucleotide modification.

[0383] In some embodiments, an oligonucleotide may be of up to 50 or up to 100 nucleotides in length in which 2 to 10, 2 to 15, 2 to 16, 2 to 17, 2 to 18, 2 to 19, 2 to 20, 2 to 25, 2 to 30, 2 to 40, 2 to 45, or more nucleotides of the oligonucleotide are modified nucleotides. The oligonucleotide may be of 8 to 30 nucleotides in length in which 2 to 10, 2 to 15, 2 to 16, 2 to 17, 2 to 18, 2 to 19, 2 to 20, 2 to 25, 2 to 30 nucleotides of the oligonucleotide are modified nucleotides. The oligonucleotide may be of 8 to 15 nucleotides in length in which 2 to 4, 2 to 5, 2 to 6, 2 to 7, 2 to 8, 2 to 9, 2 to 10, 2 to 11, 2 to 12, 2 to 13, 2 to 14 nucleotides of the oligonucleotide are modified nucleotides. Optionally, the oligonucleotides may have every nucleotide except 1, 2, 3, 4, 5, 6, 7, 8, 9, or 10 nucleotides modified. Oligonucleotide modifications are described further herein.

[0384] c. Modified Nucleosides

[0385] In some embodiments, the oligonucleotide described herein comprises at least one nucleoside modified at the 2′ position of the sugar. In some embodiments, an oligonucleotide comprises at least one 2′-modified nucleoside. In some embodiments, all of the nucleosides in the oligonucleotide are 2′-modified nucleosides.

[0386] In some embodiments, the oligonucleotide described herein comprises one or more non-bicyclic 2′-modified nucleosides, e.g., 2′-deoxy, 2′-fluoro (2′-F), 2′-O-methyl (2′-O-Me), 2′-O-methoxyethyl (2′-MOE), 2′-O-aminopropyl (2′-O-AP), 2′-O-dimethylaminoethyl (2′-O-DMAOE), 2′-O-dimethylaminopropyl (2′-O-DMAP), 2′-O-dimethylaminoethyloxyethyl (2′-O-DMAEOE), or 2′-O-N-methylacetamido (2′-O-NMA) modified nucleoside.

[0387] In some embodiments, the oligonucleotide described herein comprises one or more 2′-4′ bicyclic nucleosides in which the ribose ring comprises a bridge moiety connecting two atoms in the ring, e.g., connecting the 2′-O atom to the 4′-C atom via a methylene (LNA) bridge, an ethylene (ENA) bridge, or a (S)-constrained ethyl (cEt) bridge. Examples of LNAs are described in International Patent Application Publication WO/2008/043753, published on Apr. 17, 2008, and entitled “RNA Antagonist Compounds For The Modulation Of PCSK9”, the contents of which are incorporated herein by reference in its entirety. Examples of ENAs are provided in International Patent Publication No. WO 2005/042777, published on May 12, 2005, and entitled “APP/ENA Antisense”; Morita et al., Nucleic Acid Res., Suppl 1:241-242, 2001; Surono et al., Hum. Gene Ther., 15:749-757, 2004; Koizumi, Curr. Opin. Mol. Ther., 8:144-149, 2006 and Horie et al., Nucleic Acids Symp. Ser (Oxf), 49:171-172, 2005; the disclosures of which are incorporated herein by reference in their entireties. Examples of cEt are provided in U.S. Pat. Nos. 7,101,993; 7,399,845 and 7,569,686, each of which is herein incorporated by reference in its entirety.

[0388] In some embodiments, the oligonucleotide comprises a modified nucleoside disclosed in one of the following United States Patent or Patent Application Publications: U.S. Pat. No. 7,399,845, issued on Jul. 15, 2008, and entitled “6-Modified Bicyclic Nucleic Acid Analogs”; U.S. Pat. No. 7,741,457, issued on Jun. 22, 2010, and entitled “6-Modified Bicyclic Nucleic Acid Analogs”; U.S. Pat. No. 8,022,193, issued on Sep. 20, 2011, and entitled “6-Modified Bicyclic Nucleic Acid Analogs”; U.S. Pat. No. 7,569,686, issued on Aug. 4, 2009, and entitled “Compounds And Methods For Synthesis Of Bicyclic Nucleic Acid Analogs”; U.S. Pat. No. 7,335,765, issued on Feb. 26, 2008, and entitled “Novel Nucleoside And Oligonucleotide Analogues”; U.S. Pat. No. 7,314,923, issued on Jan. 1, 2008, and entitled “Novel Nucleoside And Oligonucleotide Analogues”; U.S. Pat. No. 7,816,333, issued on Oct. 19, 2010, and entitled “Oligonucleotide Analogues And Methods Utilizing The Same” and US Publication Number 2011/0009471 now U.S. Pat. No. 8,957,201, issued on Feb. 17, 2015, and entitled “Oligonucleotide Analogues And Methods Utilizing The Same”, the entire contents of each of which are incorporated herein by reference for all purposes.

[0389] In some embodiments, the oligonucleotide comprises at least one modified nucleoside that results in an increase in Tm of the oligonucleotide in a range of 1° C., 2° C., 3° C., 4° C., or 5° C. compared with an oligonucleotide that does not have the at least one modified nucleoside. The oligonucleotide may have a plurality of modified nucleosides that result in a total increase in Tm of the oligonucleotide in a range of 2° C., 3° C., 4° C., 5° C., 6° C., 7° C., 8° C., 9° C., 10° C., 15° C., 20° C., 25° C., 30° C., 35° C., 40° C., 45° C. or more compared with an oligonucleotide that does not have the modified nucleoside.

[0390] The oligonucleotide may comprise a mix of nucleosides of different kinds. For example, an oligonucleotide may comprise a mix of 2′-deoxyribonucleosides or ribonucleosides and 2′-fluoro modified nucleosides. An oligonucleotide may comprise a mix of deoxyribonucleosides or ribonucleosides and 2′-O-Me modified nucleosides. An oligonucleotide may comprise a mix of 2′-fluoro modified nucleosides and 2′-O-Me modified nucleosides. An oligonucleotide may comprise a mix of 2′-4′ bicyclic nucleosides and 2′-MOE, 2′-fluoro, or 2′-O-Me modified nucleosides. An oligonucleotide may comprise a mix of non-bicyclic 2′-modified nucleosides (e.g., 2′-MOE, 2′-fluoro, or 2′-O-Me) and 2′-4′ bicyclic nucleosides (e.g., LNA, ENA, cEt).

[0391] The oligonucleotide may comprise alternating nucleosides of different kinds. For example, an oligonucleotide may comprise alternating 2′-deoxyribonucleosides or ribonucleosides and 2′-fluoro modified nucleosides. An oligonucleotide may comprise alternating deoxyribonucleosides or ribonucleosides and 2′-O-Me modified nucleosides. An oligonucleotide may comprise alternating 2′-fluoro modified nucleosides and 2′-O-Me modified nucleosides. An oligonucleotide may comprise alternating 2′-4′ bicyclic nucleosides and 2′-MOE, 2′-fluoro, or 2′-O-Me modified nucleosides. An oligonucleotide may comprise alternating non-bicyclic 2′-modified nucleosides (e.g., 2′-MOE, 2′-fluoro, or 2′-O-Me) and 2′-4′ bicyclic nucleosides (e.g., LNA, ENA, cEt).

[0392] In some embodiments, an oligonucleotide described herein comprises a 5′-vinylphosphonate modification, one or more abasic residues, and/or one or more inverted abasic residues.

[0393] d. Internucleoside Linkages/Backbones

[0394] In some embodiments, oligonucleotide may contain a phosphorothioate or other modified internucleoside linkage. In some embodiments, the oligonucleotide comprises phosphorothioate internucleoside linkages. In some embodiments, the oligonucleotide comprises phosphorothioate internucleoside linkages between at least two nucleotides. In some embodiments, the oligonucleotide comprises phosphorothioate internucleoside linkages between all nucleotides. For example, in some embodiments, oligonucleotides comprise modified internucleoside linkages at the first, second, and/or (e.g., and) third internucleoside linkage at the 5′ or 3′ end of the nucleotide sequence.

[0395] Phosphorus-containing linkages that may be used include, but are not limited to, phosphorothioates, chiral phosphorothioates, phosphorodithioates, phosphotriesters, aminoalkylphosphotriesters, methyl and other alkyl phosphonates comprising 3′alkylene phosphonates and chiral phosphonates, phosphinates, phosphoramidates comprising 3′-amino phosphoramidate and aminoalkylphosphoramidates, thionophosphoramidates, thionoalkylphosphonates, thionoalkylphosphotriesters, and boranophosphates having normal 3′-5′ linkages, 2′-5′ linked analogs of these, and those having inverted polarity wherein the adjacent pairs of nucleoside units are linked 3′-5′ to 5′-3′ or 2′-5′ to 5′-2′; see U.S. Pat. Nos. 3,687,808; 4,469,863; 4,476,301; 5,023,243; 5,177,196; 5,188,897; 5,264,423; 5,276,019; 5,278,302; 5,286,717; 5,321,131; 5,399,676; 5,405,939; 5,453,496; 5,455, 233; 5,466,677; 5,476,925; 5,519,126; 5,536,821; 5,541,306; 5,550,111; 5,563, 253; 5,571,799; 5,587,361; and 5,625,050.

[0396] In some embodiments, oligonucleotides may have heteroatom backbones, such as methylene(methylimino) or MMI backbones; amide backbones (see De Mesmaeker et al. Ace. Chem. Res. 1995, 28:366-374); morpholino backbones (see Summerton and Weller, U.S. Pat. No. 5,034,506); or peptide nucleic acid (PNA) backbones (wherein the phosphodiester backbone of the oligonucleotide is replaced with a polyamide backbone, the nucleotides being bound directly or indirectly to the aza nitrogen atoms of the polyamide backbone, see Nielsen et al., Science 1991, 254, 1497).

[0397] e. Stereospecific Oligonucleotides

[0398] In some embodiments, internucleotidic phosphorus atoms of oligonucleotides are chiral, and the properties of the oligonucleotides by adjusted based on the configuration of the chiral phosphorus atoms. In some embodiments, appropriate methods may be used to synthesize P-chiral oligonucleotide analogs in a stereocontrolled manner (e.g., as described in Oka N, Wada T, Stereocontrolled synthesis of oligonucleotide analogs containing chiral internucleotidic phosphorus atoms. Chem Soc Rev. 2011 December; 40(12):5829-43.) In some embodiments, phosphorothioate containing oligonucleotides comprise nucleoside units that are joined together by either substantially all Sp or substantially all Rp phosphorothioate intersugar linkages are provided. In some embodiments, such phosphorothioate oligonucleotides having substantially chirally pure intersugar linkages are prepared by enzymatic or chemical synthesis, as described, for example, in U.S. Pat. No. 5,587,261, issued on Dec. 12, 1996, the contents of which are incorporated herein by reference in their entirety. In some embodiments, chirally controlled oligonucleotides provide selective cleavage patterns of a target nucleic acid. For example, in some embodiments, a chirally controlled oligonucleotide provides single site cleavage within a complementary sequence of a nucleic acid, as described, for example, in US Patent Application Publication 20170037399 A1, published on Feb. 2, 2017, entitled “CHIRAL DESIGN”, the contents of which are incorporated herein by reference in their entirety.

[0399] f. Morpholinos

[0400] In some embodiments, the oligonucleotide may be a morpholino-based compounds. Morpholino-based oligomeric compounds are described in Dwaine A. Braasch and David R. Corey, Biochemistry, 2002, 41(14), 4503-4510); Genesis, volume 30, issue 3, 2001; Heasman, J., Dev. Biol., 2002, 243, 209-214; Nasevicius et al., Nat. Genet., 2000, 26, 216-220; Lacerra et al., Proc. Natl. Acad. Sci., 2000, 97, 9591-9596; and U.S. Pat. No. 5,034,506, issued Jul. 23, 1991. In some embodiments, the morpholino-based oligomeric compound is a phosphorodiamidate morpholino oligomer (PMO) (e.g., as described in Iverson, Curr. Opin. Mol. Ther., 3:235-238, 2001; and Wang et al., J. Gene Med., 12:354-364, 2010; the disclosures of which are incorporated herein by reference in their entireties).

[0401] g. Peptide Nucleic Acids (PNAs)

[0402] In some embodiments, both a sugar and an internucleoside linkage (the backbone) of the nucleotide units of an oligonucleotide are replaced with novel groups. In some embodiments, the base units are maintained for hybridization with an appropriate nucleic acid target compound. One such oligomeric compound, an oligonucleotide mimetic that has been shown to have excellent hybridization properties, is referred to as a peptide nucleic acid (PNA). In PNA compounds, the sugar-backbone of an oligonucleotide is replaced with an amide containing backbone, for example, an aminoethylglycine backbone. The nucleobases are retained and are bound directly or indirectly to aza nitrogen atoms of the amide portion of the backbone. Representative publication that report the preparation of PNA compounds include, but are not limited to, U.S. Pat. Nos. 5,539,082; 5,714,331; and 5,719,262, each of which is herein incorporated by reference. Further teaching of PNA compounds can be found in Nielsen et al., Science, 1991, 254, 1497-1500.

[0403] h. Gapmers

[0404] In some embodiments, an oligonucleotide described herein is a gapmer. A gapmer oligonucleotide generally has the formula 5′-X—Y-Z-3′, with X and Z as flanking regions around a gap region Y. In some embodiments, flanking region X of formula 5′-X—Y-Z-3′ is also referred to as X region, flanking sequence X, 5′ wing region X, or 5′ wing segment. In some embodiments, flanking region Z of formula 5′-X—Y-Z-3′ is also referred to as Z region, flanking sequence Z, 3′ wing region Z, or 3′ wing segment. In some embodiments, gap region Y of formula 5′-X—Y-Z-3′ is also referred to as Y region, Y segment, or gap-segment Y. In some embodiments, each nucleoside in the gap region Y is a 2′-deoxyribonucleoside, and neither the 5′ wing region X or the 3′ wing region Z contains any 2′-deoxyribonucleosides.

[0405] In some embodiments, the Y region is a contiguous stretch of nucleotides, e.g., a region of 6 or more DNA nucleotides, which are capable of recruiting an RNAse, such as RNAse H. In some embodiments, the gapmer binds to the target nucleic acid, at which point an RNAse is recruited and can then cleave the target nucleic acid. In some embodiments, the Y region is flanked both 5′ and 3′ by regions X and Z comprising high-affinity modified nucleosides, e.g., one to six high-affinity modified nucleosides. Examples of high affinity modified nucleosides include, but are not limited to, 2′-modified nucleosides (e.g., 2′-MOE, 2′O-Me, 2′-F) or 2′-4′ bicyclic nucleosides (e.g., LNA, cEt, ENA). In some embodiments, the flanking sequences X and Z may be of 1-20 nucleotides, 1-8 nucleotides, or 1-5 nucleotides in length. The flanking sequences X and Z may be of similar length or of dissimilar lengths. In some embodiments, the gap-segment Y may be a nucleotide sequence of 5-20 nucleotides, 5-15 twelve nucleotides, or 6-10 nucleotides in length.

[0406] In some embodiments, the gap region of the gapmer oligonucleotides may contain modified nucleotides known to be acceptable for efficient RNase H action in addition to DNA nucleotides, such as C4′-substituted nucleotides, acyclic nucleotides, and arabino-configured nucleotides. In some embodiments, the gap region comprises one or more unmodified internucleosides. In some embodiments, one or both flanking regions each independently comprise one or more phosphorothioate internucleoside linkages (e.g., phosphorothioate internucleoside linkages or other linkages) between at least two, at least three, at least four, at least five or more nucleotides. In some embodiments, the gap region and two flanking regions each independently comprise modified internucleoside linkages (e.g., phosphorothioate internucleoside linkages or other linkages) between at least two, at least three, at least four, at least five or more nucleotides.

[0407] A gapmer may be produced using appropriate methods. Representative U.S. patents, U.S. patent publications, and PCT publications that teach the preparation of gapmers include, but are not limited to, U.S. Pat. Nos. 5,013,830; 5,149,797; 5,220,007; 5,256,775; 5,366,878; 5,403,711; 5,491,133; 5,565,350; 5,623,065; 5,652,355; 5,652,356; 5,700,922; 5,898,031; 7,015,315; 7,101,993; 7,399,845; 7,432,250; 7,569,686; 7,683,036; 7,750,131; 8,580,756; 9,045,754; 9,428,534; 9,695,418; 10,017,764; 10,260,069; 9,428,534; 8,580,756; U.S. patent publication Nos. US20050074801, US20090221685; US20090286969, US20100197762, and US20110112170; PCT publication Nos. WO2004069991; WO2005023825; WO2008049085 and WO2009090182; and EP Patent No. EP2,149,605, each of which is herein incorporated by reference in its entirety.

[0408] In some embodiments, a gapmer is 10-40 nucleosides in length. For example, a gapmer may be 10-40, 10-35, 10-30, 10-25, 10-20, 10-15, 15-40, 15-35, 15-30, 15-25, 15-20, 20-40, 20-35, 20-30, 20-25, 25-40, 25-35, 25-30, 30-40, 30-35, or 35-40 nucleosides in length. In some embodiments, a gapmer is 10, 11, 12, 13, 14, 15, 16, 17, 18, 19, 20, 21, 22, 23, 24, 25, 26, 27, 28, 29, 30, 31, 32, 33, 34, 35, 36, 37, 38, 39, or 40 nucleosides in length.

[0409] In some embodiments, the gap region Y in a gapmer is 5-20 nucleosides in length. For example, the gap region Y may be 5-20, 5-15, 5-10, 10-20, 10-15, or 15-20 nucleosides in length. In some embodiments, the gap region Y is 5, 6, 7, 8, 9, 10, 11, 12, 13, 14, 15, 16, 17, 18, 19, or 20 nucleosides in length. In some embodiments, each nucleoside in the gap region Y is a 2′-deoxyribonucleoside. In some embodiments, all nucleosides in the gap region Y are 2′-deoxyribonucleosides. In some embodiments, one or more of the nucleosides in the gap region Y is a modified nucleoside (e.g., a 2′ modified nucleoside such as those described herein). In some embodiments, one or more cytosines in the gap region Y are optionally 5-methyl-cytosines. In some embodiments, each cytosine in the gap region Y is a 5-methyl-cytosines.

[0410] In some embodiments, the 5′wing region of a gapmer (X in the 5′-X—Y-Z-3′ formula) and the 3′wing region of a gapmer (Z in the 5′-X—Y-Z-3′ formula) are independently 1-20 nucleosides long. For example, the 5′wing region of a gapmer (X in the 5′-X—Y-Z-3′ formula) and the 3′wing region of the gapmer (Z in the 5′-X—Y-Z-3′ formula) may be independently 1-20, 1-15, 1-10, 1-7, 1-5, 1-3, 1-2, 2-5, 2-7, 3-5, 3-7, 5-20, 5-15, 5-10, 10-20, 10-15, or 15-20 nucleosides long. In some embodiments, the 5′wing region of the gapmer (X in the 5′-X—Y-Z-3′ formula) and the 3′wing region of the gapmer (Z in the 5′-X—Y-Z-3′ formula) are independently 1, 2, 3, 4, 5, 6, 7, 8, 9, 10, 11, 12, 13, 14, 15, 16, 17, 18, 19, or 20 nucleosides long. In some embodiments, the 5′wing region of the gapmer (X in the 5′-X—Y-Z-3′ formula) and the 3′wing region of the gapmer (Z in the 5′-X—Y-Z-3′ formula) are of the same length. In some embodiments, the 5′wing region of the gapmer (X in the 5′-X—Y-Z-3′ formula) and the 3′wing region of the gapmer (Z in the 5′-X—Y-Z-3′ formula) are of different lengths. In some embodiments, the 5′wing region of the gapmer (X in the 5′-X—Y-Z-3′ formula) is longer than the 3′wing region of the gapmer (Z in the 5′-X—Y-Z-3′ formula). In some embodiments, the 5′wing region of the gapmer (X in the 5′-X—Y-Z-3′ formula) is shorter than the 3′wing region of the gapmer (Z in the 5′-X—Y-Z-3′ formula).

[0411] In some embodiments, a gapmer comprises a 5′-X—Y-Z-3′ of 5-10-5, 4-12-4, 3-14-3, 2-16-2, 1-18-1, 3-10-3, 2-10-2, 1-10-1, 2-8-2, 4-6-4, 3-6-3, 2-6-2, 4-7-4, 3-7-3, 2-7-2, 4-8-4, 3-8-3, 2-8-2, 1-8-1, 2-9-2, 1-9-1, 2-10-2, 1-10-1, 1-12-1, 1-16-1, 2-15-1, 1-15-2, 1-14-3, 3-14-1, 2-14-2, 1-13-4, 4-13-1, 2-13-3, 3-13-2, 1-12-5, 5-12-1, 2-12-4, 4-12-2, 3-12-3, 1-11-6, 6-11-1, 2-11-5, 5-11-2, 3-11-4, 4-11-3, 1-17-1, 2-16-1, 1-16-2, 1-15-3, 3-15-1, 2-15-2, 1-14-4, 4-14-1, 2-14-3, 3-14-2, 1-13-5, 5-13-1, 2-13-4, 4-13-2, 3-13-3, 1-12-6, 6-12-1, 2-12-5, 5-12-2, 3-12-4, 4-12-3, 1-11-7, 7-11-1, 2-11-6, 6-11-2, 3-11-5, 5-11-3, 4-11-4, 1-18-1, 1-17-2, 2-17-1, 1-16-3, 1-16-3, 2-16-2, 1-15-4, 4-15-1, 2-15-3, 3-15-2, 1-14-5, 5-14-1, 2-14-4, 4-14-2, 3-14-3, 1-13-6, 6-13-1, 2-13-5, 5-13-2, 3-13-4, 4-13-3, 1-12-7, 7-12-1, 2-12-6, 6-12-2, 3-12-5, 5-12-3, 1-11-8, 8-11-1, 2-11-7, 7-11-2, 3-11-6, 6-11-3, 4-11-5, 5-11-4, 1-18-1, 1-17-2, 2-17-1, 1-16-3, 3-16-1, 2-16-2, 1-15-4, 4-15-1, 2-15-3, 3-15-2, 1-14-5, 2-14-4, 4-14-2, 3-14-3, 1-13-6, 6-13-1, 2-13-5, 5-13-2, 3-13-4, 4-13-3, 1-12-7, 7-12-1, 2-12-6, 6-12-2, 3-12-5, 5-12-3, 1-11-8, 8-11-1, 2-11-7, 7-11-2, 3-11-6, 6-11-3, 4-11-5, 5-11-4, 1-19-1, 1-18-2, 2-18-1, 1-17-3, 3-17-1, 2-17-2, 1-16-4, 4-16-1, 2-16-3, 3-16-2, 1-15-5, 2-15-4, 4-15-2, 3-15-3, 1-14-6, 6-14-1, 2-14-5, 5-14-2, 3-14-4, 4-14-3, 1-13-7, 7-13-1, 2-13-6, 6-13-2, 3-13-5, 5-13-3, 4-13-4, 1-12-8, 8-12-1, 2-12-7, 7-12-2, 3-12-6, 6-12-3, 4-12-5, 5-12-4, 2-11-8, 8-11-2, 3-11-7, 7-11-3, 4-11-6, 6-11-4, 5-11-5, 1-20-1, 1-19-2, 2-19-1, 1-18-3, 3-18-1, 2-18-2, 1-17-4, 4-17-1, 2-17-3, 3-17-2, 1-16-5, 2-16-4, 4-16-2, 3-16-3, 1-15-6, 6-15-1, 2-15-5, 5-15-2, 3-15-4, 4-15-3, 1-14-7, 7-14-1, 2-14-6, 6-14-2, 3-14-5, 5-14-3, 4-14-4, 1-13-8, 8-13-1, 2-13-7, 7-13-2, 3-13-6, 6-13-3, 4-13-5, 5-13-4, 2-12-8, 8-12-2, 3-12-7, 7-12-3, 4-12-6, 6-12-4, 5-12-5, 3-11-8, 8-11-3, 4-11-7, 7-11-4, 5-11-6, 6-11-5, 1-21-1, 1-20-2, 2-20-1, 1-20-3, 3-19-1, 2-19-2, 1-18-4, 4-18-1, 2-18-3, 3-18-2, 1-17-5, 2-17-4, 4-17-2, 3-17-3, 1-16-6, 6-16-1, 2-16-5, 5-16-2, 3-16-4, 4-16-3, 1-15-7, 7-15-1, 2-15-6, 6-15-2, 3-15-5, 5-15-3, 4-15-4, 1-14-8, 8-14-1, 2-14-7, 7-14-2, 3-14-6, 6-14-3, 4-14-5, 5-14-4, 2-13-8, 8-13-2, 3-13-7, 7-13-3, 4-13-6, 6-13-4, 5-13-5, 1-12-10, 10-12-1, 2-12-9, 9-12-2, 3-12-8, 8-12- 3, 4-12-7, 7-12-4, 5-12-6, 6-12-5, 4-11-8, 8-11-4, 5-11-7, 7-11-5, 6-11-6, 1-22-1, 1-21-2, 2-21-1, 1-21-3, 3-20-1, 2-20-2, 1-19-4, 4-19-1, 2-19-3, 3-19-2, 1-18-5, 2-18-4, 4-18-2, 3-18-3, 1-17-6, 6-17-1, 2-17-5, 5-17-2, 3-17-4, 4-17-3, 1-16-7, 7-16-1, 2-16-6, 6-16-2, 3-16-5, 5-16-3, 4-16-4, 1-15-8, 8-15-1, 2-15-7, 7-15-2, 3-15-6, 6-15-3, 4-15-5, 5-15-4, 2-14-8, 8-14-2, 3-14-7, 7-14-3, 4-14-6, 6-14-4, 5-14-5, 3-13-8, 8-13-3, 4-13-7, 7-13-4, 5-13-6, 6-13-5, 4-12-8, 8-12-4, 5-12-7, 7-12-5, 6-12-6, 5-11-8, 8-11-5, 6-11-7, or 7-11-6. The numbers indicate the number of nucleosides in X, Y, and Z regions in the 5′-X—Y-Z-3′ gapmer.

[0412] In some embodiments, one or more nucleosides in the 5′wing region of a gapmer (X in the 5′-X—Y-Z-3′ formula) or the 3′wing region of a gapmer (Z in the 5′-X—Y-Z-3′ formula) are modified nucleotides (e.g., high-affinity modified nucleosides). In some embodiments, the modified nuclsoside (e.g., high-affinity modified nucleosides) is a 2′-modifeid nucleoside. In some embodiments, the 2′-modified nucleoside is a 2′-4′ bicyclic nucleoside or a non-bicyclic 2′-modified nucleoside. In some embodiments, the high-affinity modified nucleoside is a 2′-4′ bicyclic nucleoside (e.g., LNA, cEt, or ENA) or a non-bicyclic 2′-modified nucleoside (e.g., 2′-fluoro (2′-F), 2′-O-methyl (2′-O-Me), 2′-O-methoxyethyl (2′-MOE), 2′-O-aminopropyl (2′-O-AP), 2′-O-dimethylaminoethyl (2′-O-DMAOE), 2′-O-dimethylaminopropyl (2′-O-DMAP), 2′-O-dimethylaminoethyloxyethyl (2′-O-DMAEOE), or 2′-O-N-methylacetamido (2′-O-NMA)).

[0413] In some embodiments, one or more nucleosides in the 5′wing region of a gapmer (X in the 5′-X—Y-Z-3′ formula) are high-affinity modified nucleosides. In some embodiments, each nucleoside in the 5′wing region of the gapmer (X in the 5′-X—Y-Z-3′ formula) is a high-affinity modified nucleoside. In some embodiments, one or more nucleosides in the 3′wing region of a gapmer (Z in the 5′-X—Y-Z-3′ formula) are high-affinity modified nucleosides. In some embodiments, each nucleoside in the 3′wing region of the gapmer (Z in the 5′-X—Y-Z-3′ formula) is a high-affinity modified nucleoside. In some embodiments, one or more nucleosides in the 5′wing region of the gapmer (X in the 5′-X—Y-Z-3′ formula) are high-affinity modified nucleosides and one or more nucleosides in the 3′wing region of the gapmer (Z in the 5′-X—Y-Z-3′ formula) are high-affinity modified nucleosides. In some embodiments, each nucleoside in the 5′wing region of the gapmer (X in the 5′-X—Y-Z-3′ formula) is a high-affinity modified nucleoside and each nucleoside in the 3′wing region of the gapmer (Z in the 5′-X—Y-Z-3′ formula) is high-affinity modified nucleoside.

[0414] In some embodiments, the 5′wing region of a gapmer (X in the 5′-X—Y-Z-3′ formula) comprises the same high affinity nucleosides as the 3′wing region of the gapmer (Z in the 5′-X—Y-Z-3′ formula). For example, the 5′wing region of the gapmer (X in the 5′-X—Y-Z-3′ formula) and the 3′wing region of the gapmer (Z in the 5′-X—Y-Z-3′ formula) may comprise one or more non-bicyclic 2′-modified nucleosides (e.g., 2′-MOE or 2′-O-Me). In another example, the 5′wing region of the gapmer (X in the 5′-X—Y-Z-3′ formula) and the 3′wing region of the gapmer (Z in the 5′-X—Y-Z-3′ formula) may comprise one or more 2′-4′ bicyclic nucleosides (e.g., LNA or cEt). In some embodiments, each nucleoside in the 5′wing region of the gapmer (X in the 5′-X—Y-Z-3′ formula) and the 3′wing region of the gapmer (Z in the 5′-X—Y-Z-3′ formula) is a non-bicyclic 2′-modified nucleosides (e.g., 2′-MOE or 2′-O-Me). In some embodiments, each nucleoside in the 5′wing region of the gapmer (X in the 5′-X—Y-Z-3′ formula) and the 3′wing region of the gapmer (Z in the 5′-X—Y-Z-3′ formula) is a 2′-4′ bicyclic nucleosides (e.g., LNA or cEt).

[0415] In some embodiments, a gapmer comprises a 5′-X—Y-Z-3′ configuration, wherein X and Z is independently 1-7 (e.g., 1, 2, 3, 4, 5, 6, or 7) nucleosides in length and Y is 6-10 (e.g., 6, 7, 8, 9, or 10) nucleosides in length, wherein each nucleoside in X and Z is a non-bicyclic 2′-modified nucleosides (e.g., 2′-MOE or 2′-O-Me) and each nucleoside in Y is a 2′-deoxyribonucleoside. In some embodiments, the gapmer comprises a 5′-X—Y-Z-3′ configuration, wherein X and Z is independently 1-7 (e.g., 1, 2, 3, 4, 5, 6, or 7) nucleosides in length and Y is 6-10 (e.g., 6, 7, 8, 9, or 10) nucleosides in length, wherein each nucleoside in X and Z is a 2′-4′ bicyclic nucleosides (e.g., LNA or cEt) and each nucleoside in Y is a 2′-deoxyribonucleoside. In some embodiments, the 5′wing region of the gapmer (X in the 5′-X—Y-Z-3′ formula) comprises different high affinity nucleosides as the 3′wing region of the gapmer (Z in the 5′-X—Y-Z-3′ formula). For example, the 5′wing region of the gapmer (X in the 5′-X—Y-Z-3′ formula) may comprise one or more non-bicyclic 2′-modified nucleosides (e.g., 2′-MOE or 2′-O-Me) and the 3′wing region of the gapmer (Z in the 5′-X—Y-Z-3′ formula) may comprise one or more 2′-4′ bicyclic nucleosides (e.g., LNA or cEt). In another example, the 3′wing region of the gapmer (Z in the 5′-X—Y-Z-3′ formula) may comprise one or more non-bicyclic 2′-modified nucleosides (e.g., 2′-MOE or 2′-O-Me) and the 5′wing region of the gapmer (X in the 5′-X—Y-Z-3′ formula) may comprise one or more 2′-4′ bicyclic nucleosides (e.g., LNA or cEt).

[0416] In some embodiments, a gapmer comprises a 5′-X—Y-Z-3′ configuration, wherein X and Z is independently 1-7 (e.g., 1, 2, 3, 4, 5, 6, or 7) nucleosides in length and Y is 6-10 (e.g., 6, 7, 8, 9, or 10) nucleosides in length, wherein each nucleoside in X is a non-bicyclic 2′-modified nucleosides (e.g., 2′-MOE or 2′-O-Me), each nucleoside in Z is a 2′-4′ bicyclic nucleosides (e.g., LNA or cEt), and each nucleoside in Y is a 2′-deoxyribonucleoside. In some embodiments, the gapmer comprises a 5′-X—Y-Z-3′ configuration, wherein X and Z is independently 1-7 (e.g., 1, 2, 3, 4, 5, 6, or 7) nucleosides in length and Y is 6-10 (e.g., 6, 7, 8, 9, or 10) nucleosides in length, wherein each nucleoside in X is a 2′-4′ bicyclic nucleosides (e.g., LNA or cEt), each nucleoside in Z is a non-bicyclic 2′-modified nucleosides (e.g., 2′-MOE or 2′-O-Me) and each nucleoside in Y is a 2′-deoxyribonucleoside.

[0417] In some embodiments, the 5′wing region of a gapmer (X in the 5′-X—Y-Z-3′ formula) comprises one or more non-bicyclic 2′-modified nucleosides (e.g., 2′-MOE or 2′-O-Me) and one or more 2′-4′ bicyclic nucleosides (e.g., LNA or cEt). In some embodiments, the 3′wing region of the gapmer (Z in the 5′-X—Y-Z-3′ formula) comprises one or more non-bicyclic 2′-modified nucleosides (e.g., 2′-MOE or 2′-O-Me) and one or more 2′-4′ bicyclic nucleosides (e.g., LNA or cEt). In some embodiments, both the 5′wing region of the gapmer (X in the 5′-X—Y-Z-3′ formula) and the 3′wing region of the gapmer (Z in the 5′-X—Y-Z-3′ formula) comprise one or more non-bicyclic 2′-modified nucleosides (e.g., 2′-MOE or 2′-O-Me) and one or more 2′-4′ bicyclic nucleosides (e.g., LNA or cEt).

[0418] In some embodiments, a gapmer comprises a 5′-X—Y-Z-3′ configuration, wherein X and Z is independently 2-7 (e.g., 2, 3, 4, 5, 6, or 7) nucleosides in length and Y is 6-10 (e.g., 6, 7, 8, 9, or 10) nucleosides in length, wherein at least one but not all (e.g., 1, 2, 3, 4, 5, or 6) of positions 1, 2, 3, 4, 5, 6, or 7 in X (the 5′ most position is position 1) is a non-bicyclic 2′-modified nucleoside (e.g., 2′-MOE or 2′-O-Me), wherein the rest of the nucleosides in both X and Z are 2′-4′ bicyclic nucleosides (e.g., LNA or cEt), and wherein each nucleoside in Y is a 2′deoxyribonucleoside. In some embodiments, the gapmer comprises a 5′-X—Y-Z-3′ configuration, wherein X and Z is independently 2-7 (e.g., 2, 3, 4, 5, 6, or 7) nucleosides in length and Y is 6-10 (e.g., 6, 7, 8, 9, or 10) nucleosides in length, wherein at least one but not all (e.g., 1, 2, 3, 4, 5, or 6) of positions 1, 2, 3, 4, 5, 6, or 7 in Z (the 5′ most position is position 1) is a non-bicyclic 2′-modified nucleoside (e.g., 2′-MOE or 2′-O-Me), wherein the rest of the nucleosides in both X and Z are 2′-4′ bicyclic nucleosides (e.g., LNA or cEt), and wherein each nucleoside in Y is a 2′deoxyribonucleoside. In some embodiments, the gapmer comprises a 5′-X—Y-Z-3′ configuration, wherein X and Z is independently 2-7 (e.g., 2, 3, 4, 5, 6, or 7) nucleosides in length and Y is 6-10 (e.g., 6, 7, 8, 9, or 10) nucleosides in length, wherein at least one but not all (e.g., 1, 2, 3, 4, 5, or 6) of positions 1, 2, 3, 4, 5, 6, or 7 in X and at least one of positions but not all (e.g., 1, 2, 3, 4, 5, or 6) 1, 2, 3, 4, 5, 6, or 7 in Z (the 5′ most position is position 1) is a non-bicyclic 2′-modified nucleoside (e.g., 2′-MOE or 2′-O-Me), wherein the rest of the nucleosides in both X and Z are 2′-4′ bicyclic nucleosides (e.g., LNA or cEt), and wherein each nucleoside in Y is a 2′deoxyribonucleoside.

[0419] Non-limiting examples of gapmers configurations with a mix of non-bicyclic 2′-modified nucleoside (e.g., 2′-MOE or 2′-O-Me) and 2′-4′ bicyclic nucleosides (e.g., LNA or cEt) in the 5′wing region of the gapmer (X in the 5′-X—Y-Z-3′ formula) and/or the 3′wing region of the gapmer (Z in the 5′-X—Y-Z-3′ formula) include: BBB-(D)n-BBBAA; KKK-(D)n-KKKAA; LLL-(D)n-LLLAA; BBB-(D)n-BBBEE; KKK-(D)n-KKKEE; LLL-(D)n-LLLEE; BBB-(D)n-BBBAA; KKK-(D)n-KKKAA; LLL-(D)n-LLLAA; BBB-(D)n-BBBEE; KKK-(D)n-KKKEE; LLL-(D)n-LLLEE; BBB-(D)n-BBBAAA; KKK-(D)n-KKKAAA; LLL-(D)n-LLLAAA; BBB-(D)n-BBBEEE; KKK-(D)n-KKKEEE; LLL-(D)n-LLLEEE; BBB-(D)n-BBBAAA; KKK-(D)n-KKKAAA; LLL-(D)n-LLLAAA; BBB-(D)n-BBBEEE; KKK-(D)n-KKKEEE; LLL-(D)n-LLLEEE; BABA-(D)n-ABAB; KAKA-(D)n-AKAK; LALA-(D)n-ALAL; BEBE-(D)n-EBEB; KEKE-(D)n-EKEK; LELE-(D)n-ELEL; BABA-(D)n-ABAB; KAKA-(D)n-AKAK; LALA-(D)n-ALAL; BEBE-(D)n-EBEB; KEKE-(D)n-EKEK; LELE-(D)n-ELEL; ABAB-(D)n-ABAB; AKAK-(D)n-AKAK; ALAL-(D)n-ALAL; EBEB-(D)n-EBEB; EKEK-(D)n-EKEK; ELEL-(D)n-ELEL; ABAB-(D)n-ABAB; AKAK-(D)n-AKAK; ALAL-(D)n-ALAL; EBEB-(D)n-EBEB; EKEK-(D)n-EKEK; ELEL-(D)n-ELEL; AABB-(D)n-BBAA; BBAA-(D)n-AABB; AAKK-(D)n-KKAA; AALL-(D)n-LLAA; EEBB-(D)n-BBEE; EEKK-(D)n-KKEE; EELL-(D)n-LLEE; AABB-(D)n-BBAA; AAKK-(D)n-KKAA; AALL-(D)n-LLAA; EEBB-(D)n-BBEE; EEKK-(D)n-KKEE; EELL-(D)n-LLEE; BBB-(D)n-BBA; KKK-(D)n-KKA; LLL-(D)n-LLA; BBB-(D)n-BBE; KKK-(D)n-KKE; LLL-(D)n-LLE; BBB-(D)n-BBA; KKK-(D)n-KKA; LLL-(D)n-LLA; BBB-(D)n-BBE; KKK-(D)n-KKE; LLL-(D)n-LLE; BBB-(D)n-BBA; KKK-(D)n-KKA; LLL-(D)n-LLA; BBB-(D)n-BBE; KKK-(D)n-KKE; LLL-(D)n-LLE; ABBB-(D)n-BBBA; AKKK-(D)n-KKKA; ALLL-(D)n-LLLA; EBBB-(D)n-BBBE; EKKK-(D)n-KKKE; ELLL-(D)n-LLLE; ABBB-(D)n-BBBA; AKKK-(D)n-KKKA; ALLL-(D)n-LLLA; EBBB-(D)n-BBBE; EKKK-(D)n-KKKE; ELLL-(D)n-LLLE; ABBB-(D)n-BBBAA; AKKK-(D)n-KKKAA; ALLL-(D)n-LLLAA; EBBB-(D)n-BBBEE; EKKK-(D)n-KKKEE; ELLL-(D)n-LLLEE; ABBB-(D)n-BBBAA; AKKK-(D)n-KKKAA; ALLL-(D)n-LLLAA; EBBB-(D)n-BBBEE; EKKK-(D)n-KKKEE; ELLL-(D)n-LLLEE; AABBB-(D)n-BBB; AAKKK-(D)n-KKK; AALLL-(D)n-LLL; EEBBB-(D)n-BBB; EEKKK-(D)n-KKK; EELLL-(D)n-LLL; AABBB-(D)n-BBB; AAKKK-(D)n-KKK; AALLL-(D)n-LLL; EEBBB-(D)n-BBB; EEKKK-(D)n-KKK; EELLL-(D)n-LLL; AABBB-(D)n-BBBA; AAKKK-(D)n-KKKA; AALLL-(D)n-LLLA; EEBBB-(D)n-BBBE; EEKKK-(D)n-KKKE; EELLL-(D)n-LLLE; AABBB-(D)n-BBBA; AAKKK-(D)n-KKKA; AALLL-(D)n-LLLA; EEBBB-(D)n-BBBE; EEKKK-(D)n-KKKE; EELLL-(D)n-LLLE; ABBAABB-(D)n-BB; AKKAAKK-(D)n-KK; ALLAALLL-(D)n-LL; EBBEEBB-(D)n-BB; EKKEEKK-(D)n-KK; ELLEELL-(D)n-LL; ABBAABB-(D)n-BB; AKKAAKK-(D)n-KK; ALLAALL-(D)n-LL; EBBEEBB-(D)n-BB; EKKEEKK-(D)n-KK; ELLEELL-(D)n-LL; ABBABB-(D)n-BBB; AKKAKK-(D)n-KKK; ALLALLL-(D)n-LLL; EBBEBB-(D)n-BBB; EKKEKK-(D)n-KKK; ELLELL-(D)n-LLL; ABBABB-(D)n-BBB; AKKAKK-(D)n-KKK; ALLALL-(D)n-LLL; EBBEBB-(D)n-BBB; EKKEKK-(D)n-KKK; ELLELL-(D)n-LLL; EEEK-(D)n-EEEEEEEE; EEK-(D)n-EEEEEEEEE; EK-(D)n-EEEEEEEEEE; EK-(D)n-EEEKK; K-(D)n-EEEKEKE; K-(D)n-EEEKEKEE; K-(D)n-EEKEK; EK-(D)n-EEEEKEKE; EK-(D)n-EEEKEK; EEK-(D)n-KEEKE; EK-(D)n-EEKEK; EK-(D)n-KEEK; EEK-(D)n-EEEKEK; EK-(D)n-KEEEKEE; EK-(D)n-EEKEKE; EK-(D)n-EEEKEKE; and EK-(D)n-EEEEKEK; “A” nucleosides comprise a 2′-modified nucleoside; “B” represents a 2′-4′ bicyclic nucleoside; “K” represents a constrained ethyl nucleoside (cEt); “L” represents an LNA nucleoside; and “E” represents a 2′-MOE modified ribonucleoside; “D” represents a 2′-deoxyribonucleoside; “n” represents the length of the gap segment (Y in the 5′-X—Y-Z-3′ configuration) and is an integer between 1-20.

[0420] In some embodiments, any one of the gapmers described herein comprises one or more modified nucleoside linkages (e.g., a phosphorothioate linkage) in each of the X, Y, and Z regions. In some embodiments, each internucleoside linkage in the any one of the gapmers described herein is a phosphorothioate linkage. In some embodiments, each of the X, Y, and Z regions independently comprises a mix of phosphorothioate linkages and phosphodiester linkages. In some embodiments, each internucleoside linkage in the gap region Y is a phosphorothioate linkage, the 5′wing region X comprises a mix of phosphorothioate linkages and phosphodiester linkages, and the 3′wing region Z comprises a mix of phosphorothioate linkages and phosphodiester linkages.

[0421] i. Mixmers

[0422] In some embodiments, an oligonucleotide described herein may be a mixmer or comprise a mixmer sequence pattern. In general, mixmers are oligonucleotides that comprise both naturally and non-naturally occurring nucleosides or comprise two different types of non-naturally occurring nucleosides typically in an alternating pattern. Mixmers generally have higher binding affinity than unmodified oligonucleotides and may be used to specifically bind a target molecule, e.g., to block a binding site on the target molecule. Generally, mixmers do not recruit an RNase to the target molecule and thus do not promote cleavage of the target molecule. Such oligonucleotides that are incapable of recruiting RNase H have been described, for example, see WO2007/112754 or WO2007/112753.

[0423] In some embodiments, the mixmer comprises or consists of a repeating pattern of nucleoside analogues and naturally occurring nucleosides, or one type of nucleoside analogue and a second type of nucleoside analogue. However, a mixmer need not comprise a repeating pattern and may instead comprise any arrangement of modified nucleoside s and naturally occurring nucleoside s or any arrangement of one type of modified nucleoside and a second type of modified nucleoside. The repeating pattern, may, for instance be every second or every third nucleoside is a modified nucleoside, such as LNA, and the remaining nucleoside s are naturally occurring nucleosides, such as DNA, or are a 2′ substituted nucleoside analogue such as 2′-MOE or 2′ fluoro analogues, or any other modified nucleoside described herein. It is recognized that the repeating pattern of modified nucleoside, such as LNA units, may be combined with modified nucleoside at fixed positions—e.g. at the 5′ or 3′ termini.

[0424] In some embodiments, a mixmer does not comprise a region of more than 5, more than 4, more than 3, or more than 2 consecutive naturally occurring nucleosides, such as DNA nucleosides. In some embodiments, the mixmer comprises at least a region consisting of at least two consecutive modified nucleoside, such as at least two consecutive LNAs. In some embodiments, the mixmer comprises at least a region consisting of at least three consecutive modified nucleoside units, such as at least three consecutive LNAs.

[0425] In some embodiments, the mixmer does not comprise a region of more than 7, more than 6, more than 5, more than 4, more than 3, or more than 2 consecutive nucleoside analogues, such as LNAs. In some embodiments, LNA units may be replaced with other nucleoside analogues, such as those referred to herein.

[0426] Mixmers may be designed to comprise a mixture of affinity enhancing modified nucleosides, such as in non-limiting example LNA nucleosides and 2′-O-Me nucleosides. In some embodiments, a mixmer comprises modified internucleoside linkages (e.g., phosphorothioate internucleoside linkages or other linkages) between at least two, at least three, at least four, at least five or more nucleosides.

[0427] A mixmer may be produced using any suitable method. Representative U.S. patents, U.S. patent publications, and PCT publications that teach the preparation of mixmers include U.S. patent publication Nos. US20060128646, US20090209748, US20090298916, US20110077288, and US20120322851, and U.S. Pat. No. 7,687,617.

[0428] In some embodiments, a mixmer comprises one or more morpholino nucleosides. For example, in some embodiments, a mixmer may comprise morpholino nucleosides mixed (e.g., in an alternating manner) with one or more other nucleosides (e.g., DNA, RNA nucleosides) or modified nucleosides (e.g., LNA, 2′-O-Me nucleosides).

[0429] In some embodiments, mixmers are useful for splice correcting or exon skipping, for example, as reported in Touznik A., et al., LNA/DNA mixmer-based antisense oligonucleotides correct alternative splicing of the SMN2 gene and restore SMN protein expression in type 1 SMA fibroblasts Scientific Reports, volume 7, Article number: 3672 (2017), Chen S. et al., Synthesis of a Morpholino Nucleic Acid (MNA)-Uridine Phosphoramidite, and Exon Skipping Using MNA/2′-O-Methyl Mixmer Antisense Oligonucleotide, Molecules 2016, 21, 1582, the contents of each which are incorporated herein by reference.

[0430] j. RNA Interference (RNAi)

[0431] In some embodiments, oligonucleotides provided herein may be in the form of small interfering RNAs (siRNA), also known as short interfering RNA or silencing RNA. SiRNA, is a class of double-stranded RNA molecules, typically about 20-25 base pairs in length that target nucleic acids (e.g., mRNAs) for degradation via the RNA interference (RNAi) pathway in cells. Specificity of siRNA molecules may be determined by the binding of the antisense strand of the molecule to its target RNA. Effective siRNA molecules are generally less than 30 to 35 base pairs in length to prevent the triggering of non-specific RNA interference pathways in the cell via the interferon response, although longer siRNA can also be effective. In some embodiments, the siRNA molecules are 7, 8, 9, 10, 11, 12, 13, 14, 15, 16, 17, 18, 19, 20, 21, 22, 23, 24, 25, 26, 27, 28, 29, 30, 35, 40, 45, 50, or more base pairs in length. In some embodiments, the siRNA molecules are 8 to 30 base pairs in length, 10 to 15 base pairs in length, 10 to 20 base pairs in length, 15 to 25 base pairs in length, 19 to 21 base pairs in length, 21 to 23 base pairs in length.

[0432] Following selection of an appropriate target RNA sequence, siRNA molecules that comprise a nucleotide sequence complementary to all or a portion of the target sequence, i.e. an antisense sequence, can be designed and prepared using appropriate methods (see, e.g., PCT Publication Number WO 2004/016735; and U.S. Patent Publication Nos. 2004/0077574 and 2008/0081791). The siRNA molecule can be double stranded (i.e. a dsRNA molecule comprising an antisense strand and a complementary sense strand that hybridizes to form the dsRNA) or single-stranded (i.e. a ssRNA molecule comprising just an antisense strand). The siRNA molecules can comprise a duplex, asymmetric duplex, hairpin or asymmetric hairpin secondary structure, having self-complementary sense and antisense strands.

[0433] In some embodiments, the antisense strand of the siRNA molecule is 7, 8, 9, 10, 11, 12, 13, 14, 15, 16, 17, 18, 19, 20, 21, 22, 23, 24, 25, 26, 27, 28, 29, 30, 35, 40, 45, 50, or more nucleotides in length. In some embodiments, the antisense strand is 8 to 50 nucleotides in length, 8 to 40 nucleotides in length, 8 to 30 nucleotides in length, 10 to 15 nucleotides in length, 10 to 20 nucleotides in length, 15 to 25 nucleotides in length, 19 to 21 nucleotides in length, 21 to 23 nucleotides in lengths.

[0434] In some embodiments, the sense strand of the siRNA molecule is 7, 8, 9, 10, 11, 12, 13, 14, 15, 16, 17, 18, 19, 20, 21, 22, 23, 24, 25, 26, 27, 28, 29, 30, 35, 40, 45, 50, or more nucleotides in length. In some embodiments, the sense strand is 8 to 50 nucleotides in length, 8 to 40 nucleotides in length, 8 to 30 nucleotides in length, 10 to 15 nucleotides in length, 10 to 20 nucleotides in length, 15 to 25 nucleotides in length, 19 to 21 nucleotides in length, 21 to 23 nucleotides in lengths.

[0435] In some embodiments, siRNA molecules comprise an antisense strand comprising a region of complementarity to a target region in a target mRNA. In some embodiments, the region of complementarity is at least 80%, at least 85%, at least 90%, at least 91%, at least 92%, at least 93%, at least 94%, at least 95%, at least 96%, at least 97%, at least 98%, at least 99% or 100% complementary to a target region in a target mRNA. In some embodiments, the target region is a region of consecutive nucleotides in the target mRNA. In some embodiments, a complementary nucleotide sequence need not be 100% complementary to that of its target to be specifically hybridizable or specific for a target RNA sequence.

[0436] In some embodiments, siRNA molecules comprise an antisense strand that comprises a region of complementarity to a target RNA sequence and the region of complementarity is in the range of 8 to 15, 8 to 30, 8 to 40, or 10 to 50, or 5 to 50, or 5 to 40 nucleotides in length. In some embodiments, a region of complementarity is 5, 6, 7, 8, 9, 10, 11, 12, 13, 14, 15, 16, 17, 18, 19, 20, 21, 22, 23, 24, 25, 26, 27, 28, 29, 30, 31, 32, 33, 34, 35, 36, 37, 38, 39, 40, 41, 42, 43, 44, 45, 46, 47, 48, 49, or 50 nucleotides in length. In some embodiments, the region of complementarity is complementary with at least 6, at least 7, at least 8, at least 9, at least 10, at least 11, at least 12, at least 13, at least 14, at least 15, at least 16, at least 17, at least 18, at least 19, at least 20, at least 21, at least 22, at least 23, at least 24, at least 25 or more consecutive nucleotides of a target RNA sequence. In some embodiments, siRNA molecules comprise a nucleotide sequence that contains no more than 1, 2, 3, 4, or 5 base mismatches compared to the portion of the consecutive nucleotides of target RNA sequence. In some embodiments, siRNA molecules comprise a nucleotide sequence that has up to 3 mismatches over 15 bases, or up to 2 mismatches over 10 bases.

[0437] In some embodiments, siRNA molecules comprise an antisense strand comprising a nucleotide sequence that is complementary (e.g., at least 85%, at least 90%, at least 95%, or 100%) to the target RNA sequence of the oligonucleotides provided herein. In some embodiments, siRNA molecules comprise an antisense strand comprising a nucleotide sequence that is at least 85%, at least 90%, at least 95%, or 100% identical to the oligonucleotides provided herein. In some embodiments, siRNA molecules comprise an antisense strand comprising at least 6, at least 7, at least 8, at least 9, at least 10, at least 11, at least 12, at least 13, at least 14, at least 15, at least 16, at least 17, at least 18, at least 19, at least 20, at least 21, at least 22, at least 23, at least 24, at least 25 or more consecutive nucleotides of the oligonucleotides provided herein.

[0438] Double-stranded siRNA may comprise sense and anti-sense RNA strands that are the same length or different lengths. Double-stranded siRNA molecules can also be assembled from a single oligonucleotide in a stem-loop structure, wherein self-complementary sense and antisense regions of the siRNA molecule are linked by means of a nucleic acid based or non-nucleic acid-based linker(s), as well as circular single-stranded RNA having two or more loop structures and a stem comprising self-complementary sense and antisense strands, wherein the circular RNA can be processed either in vivo or in vitro to generate an active siRNA molecule capable of mediating RNAi. Small hairpin RNA (shRNA) molecules thus are also contemplated herein. These molecules comprise a specific antisense sequence in addition to the reverse complement (sense) sequence, typically separated by a spacer or loop sequence. Cleavage of the spacer or loop provides a single-stranded RNA molecule and its reverse complement, such that they may anneal to form a dsRNA molecule (optionally with additional processing steps that may result in addition or removal of one, two, three or more nucleotides from the 3′ end and/or (e.g., and) the 5′ end of either or both strands). A spacer can be of a sufficient length to permit the antisense and sense sequences to anneal and form a double-stranded structure (or stem) prior to cleavage of the spacer (and, optionally, subsequent processing steps that may result in addition or removal of one, two, three, four, or more nucleotides from the 3′ end and/or (e.g., and) the 5′ end of either or both strands). A spacer sequence is may be an unrelated nucleotide sequence that is situated between two complementary nucleotide sequence regions which, when annealed into a double-stranded nucleic acid, comprise a shRNA.

[0439] The overall length of the siRNA molecules can vary from about 14 to about 100 nucleotides depending on the type of siRNA molecule being designed. Generally between about 14 and about 50 of these nucleotides are complementary to the RNA target sequence, i.e. constitute the specific antisense sequence of the siRNA molecule. For example, when the siRNA is a double- or single-stranded siRNA, the length can vary from about 14 to about 50 nucleotides, whereas when the siRNA is a shRNA or circular molecule, the length can vary from about 40 nucleotides to about 100 nucleotides.

[0440] An siRNA molecule may comprise a 3′ overhang at one end of the molecule, The other end may be blunt-ended or have also an overhang (5′ or 3′). When the siRNA molecule comprises an overhang at both ends of the molecule, the length of the overhangs may be the same or different. In one embodiment, the siRNA molecule of the present disclosure comprises 3′ overhangs of about 1 to about 3 nucleotides on both ends of the molecule. In some embodiments, the siRNA molecule comprises 3′ overhangs of about 1 to about 3 nucleotides on the sense strand. In some embodiments, the siRNA molecule comprises 3′ overhangs of about 1 to about 3 nucleotides on the antisense strand. In some embodiments, the siRNA molecule comprises 3′ overhangs of about 1 to about 3 nucleotides on both the sense strand and the antisense strand.

[0441] In some embodiments, the siRNA molecule comprises one or more modified nucleotides (e.g. 1, 2, 3, 4, 5, 6, 7, 8, 9, 10 or more). In some embodiments, the siRNA molecule comprises one or more modified nucleotides and/or (e.g., and) one or more modified internucleotide linkages. In some embodiments, the modified nucleotide is a modified sugar moiety (e.g. a 2′ modified nucleotide). In some embodiments, the siRNA molecule comprises one or more 2′ modified nucleotides, e.g., a 2′-deoxy, 2′-fluoro (2′-F), 2′-O-methyl (2′-O-Me), 2′-O-methoxyethyl (2′-MOE), 2′-O-aminopropyl (2′-O-AP), 2′-O-dimethylaminoethyl (2′-O-DMAOE), 2′-O-dimethylaminopropyl (2′-O-DMAP), 2′-O-dimethylaminoethyloxyethyl (2′-O-DMAEOE), or 2′-O—N-methylacetamido (2′-O—NMA). In some embodiments, each nucleotide of the siRNA molecule is a modified nucleotide (e.g., a 2′-modified nucleotide). In some embodiments, the siRNA molecule comprises one or more phosphorodiamidate morpholinos. In some embodiments, each nucleotide of the siRNA molecule is a phosphorodiamidate morpholino.

[0442] In some embodiments, the siRNA molecule contains a phosphorothioate or other modified internucleotide linkage. In some embodiments, the siRNA molecule comprises phosphorothioate internucleoside linkages. In some embodiments, the siRNA molecule comprises phosphorothioate internucleoside linkages between at least two nucleotides. In some embodiments, the siRNA molecule comprises phosphorothioate internucleoside linkages between all nucleotides. For example, in some embodiments, the siRNA molecule comprises modified internucleotide linkages at the first, second, and/or (e.g., and) third internucleoside linkage at the 5′ or 3′ end of the siRNA molecule.

[0443] In some embodiments, the modified internucleotide linkages are phosphorus-containing linkages. In some embodiments, phosphorus-containing linkages that may be used include, but are not limited to, phosphorothioates, chiral phosphorothioates, phosphorodithioates, phosphotriesters, aminoalkylphosphotriesters, methyl and other alkyl phosphonates comprising 3′alkylene phosphonates and chiral phosphonates, phosphinates, phosphoramidates comprising 3′-amino phosphoramidate and aminoalkylphosphoramidates, thionophosphoramidates, thionoalkylphosphonates, thionoalkylphosphotriesters, and boranophosphates having normal 3′-5′ linkages, 2′-5′ linked analogs of these, and those having inverted polarity wherein the adjacent pairs of nucleoside units are linked 3′-5′ to 5′-3′ or 2′-5′ to 5′-2′; see U.S. Pat. Nos. 3,687,808; 4,469,863; 4,476,301; 5,023,243; 5,177,196; 5,188,897; 5,264,423; 5,276,019; 5,278,302; 5,286,717; 5,321,131; 5,399,676; 5,405,939; 5,453,496; 5,455, 233; 5,466,677; 5,476,925; 5,519,126; 5,536,821; 5,541,306; 5,550,111; 5,563, 253; 5,571,799; 5,587,361; and 5,625,050.

[0444] Any of the modified chemistries or formats of siRNA molecules described herein can be combined with each other. For example, one, two, three, four, five, or more different types of modifications can be included within the same siRNA molecule.

[0445] In some embodiments, the antisense strand comprises one or more modified nucleotides (e.g. 1, 2, 3, 4, 5, 6, 7, 8, 9, 10 or more). In some embodiments, the antisense strand comprises one or more modified nucleotides and/or (e.g., and) one or more modified internucleotide linkages. In some embodiments, the modified nucleotide comprises a modified sugar moiety (e.g. a 2′ modified nucleotide). In some embodiments, the antisense strand comprises one or more 2′ modified nucleotides, e.g., a 2′-deoxy, 2′-fluoro (2′-F), 2′-O-methyl (2′-O-Me), 2′-O-methoxyethyl (2′-MOE), 2′-O-aminopropyl (2′-O-AP), 2′-O-dimethylaminoethyl (2′-O-DMAOE), 2′-O-dimethylaminopropyl (2′-O-DMAP), 2′-O-dimethylaminoethyloxyethyl (2′-O-DMAEOE), or 2′-O—N-methylacetamido (2′-O—NMA). In some embodiments, each nucleotide of the antisense strand is a modified nucleotide (e.g., a 2′-modified nucleotide). In some embodiments, the antisense strand comprises one or more phosphorodiamidate morpholinos. In some embodiments, the antisense strand is a phosphorodiamidate morpholino oligomer (PMO).

[0446] In some embodiments, antisense strand contains a phosphorothioate or other modified internucleotide linkage. In some embodiments, the antisense strand comprises phosphorothioate internucleoside linkages. In some embodiments, the antisense strand comprises phosphorothioate internucleoside linkages between at least two nucleotides. In some embodiments, the antisense strand comprises phosphorothioate internucleoside linkages between all nucleotides. For example, in some embodiments, the antisense strand comprises modified internucleotide linkages at the first, second, and/or (e.g., and) third internucleoside linkage at the 5′ or 3′ end of the siRNA molecule. In some embodiments, the modified internucleotide linkages are phosphorus-containing linkages. In some embodiments, phosphorus-containing linkages that may be used include, but are not limited to, phosphorothioates, chiral phosphorothioates, phosphorodithioates, phosphotriesters, aminoalkylphosphotriesters, methyl and other alkyl phosphonates comprising 3′alkylene phosphonates and chiral phosphonates, phosphinates, phosphoramidates comprising 3′-amino phosphoramidate and aminoalkylphosphoramidates, thionophosphoramidates, thionoalkylphosphonates, thionoalkylphosphotriesters, and boranophosphates having normal 3′-5′ linkages, 2′-5′ linked analogs of these, and those having inverted polarity wherein the adjacent pairs of nucleoside units are linked 3′-5′ to 5′-3′ or 2′-5′ to 5′-2′; see U.S. Pat. Nos. 3,687,808; 4,469,863; 4,476,301; 5,023,243; 5,177,196; 5,188,897; 5,264,423; 5,276,019; 5,278,302; 5,286,717; 5,321,131; 5,399,676; 5,405,939; 5,453,496; 5,455, 233; 5,466,677; 5,476,925; 5,519,126; 5,536,821; 5,541,306; 5,550,111; 5,563, 253; 5,571,799; 5,587,361; and 5,625,050.

[0447] Any of the modified chemistries or formats of the antisense strand described herein can be combined with each other. For example, one, two, three, four, five, or more different types of modifications can be included within the same antisense strand.

[0448] In some embodiments, the sense strand comprises one or more modified nucleotides (e.g. 1, 2, 3, 4, 5, 6, 7, 8, 9, 10 or more). In some embodiments, the sense strand comprises one or more modified nucleotides and/or (e.g., and) one or more modified internucleotide linkages. In some embodiments, the modified nucleotide is a modified sugar moiety (e.g. a 2′ modified nucleotide). In some embodiments, the sense strand comprises one or more 2′ modified nucleotides, e.g., a 2′-deoxy, 2′-fluoro (2′-F), 2′-O-methyl (2′-O-Me), 2′-O-methoxyethyl (2′-MOE), 2′-O-aminopropyl (2′-O-AP), 2′-O-dimethylaminoethyl (2′-O-DMAOE), 2′-O-dimethylaminopropyl (2′-O-DMAP), 2′-O-dimethylaminoethyloxyethyl (2′-O-DMAEOE), or 2′-O—N-methylacetamido (2′-O—NMA). In some embodiments, each nucleotide of the sense strand is a modified nucleotide (e.g., a 2′-modified nucleotide). In some embodiments, the sense strand comprises one or more phosphorodiamidate morpholinos. In some embodiments, the antisense strand is a phosphorodiamidate morpholino oligomer (PMO). In some embodiments, the sense strand contains a phosphorothioate or other modified internucleotide linkage. In some embodiments, the sense strand comprises phosphorothioate internucleoside linkages. In some embodiments, the sense strand comprises phosphorothioate internucleoside linkages between at least two nucleotides. In some embodiments, the sense strand comprises phosphorothioate internucleoside linkages between all nucleotides. For example, in some embodiments, the sense strand comprises modified internucleotide linkages at the first, second, and/or (e.g., and) third internucleoside linkage at the 5′ or 3′ end of the sense strand.

[0449] In some embodiments, the modified internucleotide linkages are phosphorus-containing linkages. In some embodiments, phosphorus-containing linkages that may be used include, but are not limited to, phosphorothioates, chiral phosphorothioates, phosphorodithioates, phosphotriesters, aminoalkylphosphotriesters, methyl and other alkyl phosphonates comprising 3′alkylene phosphonates and chiral phosphonates, phosphinates, phosphoramidates comprising 3′-amino phosphoramidate and aminoalkylphosphoramidates, thionophosphoramidates, thionoalkylphosphonates, thionoalkylphosphotriesters, and boranophosphates having normal 3′-5′ linkages, 2′-5′ linked analogs of these, and those having inverted polarity wherein the adjacent pairs of nucleoside units are linked 3′-5′ to 5′-3′ or 2′-5′ to 5′-2′; see U.S. Pat. Nos. 3,687,808; 4,469,863; 4,476,301; 5,023,243; 5,177,196; 5,188,897; 5,264,423; 5,276,019; 5,278,302; 5,286,717; 5,321,131; 5,399,676; 5,405,939; 5,453,496; 5,455, 233; 5,466,677; 5,476,925; 5,519,126; 5,536,821; 5,541,306; 5,550,111; 5,563, 253; 5,571,799; 5,587,361; and 5,625,050.

[0450] Any of the modified chemistries or formats of the sense strand described herein can be combined with each other. For example, one, two, three, four, five, or more different types of modifications can be included within the same sense strand.

[0451] In some embodiments, the antisense or sense strand of the siRNA molecule comprises modifications that enhance or reduce RNA-induced silencing complex (RISC) loading. In some embodiments, the antisense strand of the siRNA molecule comprises modifications that enhance RISC loading. In some embodiments, the sense strand of the siRNA molecule comprises modifications that reduce RISC loading and reduce off-target effects. In some embodiments, the antisense strand of the siRNA molecule comprises a 2′-O-methoxyethyl (2′-MOE) modification. The addition of the 2′-O-methoxyethyl (2′-MOE) group at the cleavage site improves both the specificity and silencing activity of siRNAs by facilitating the oriented RNA-induced silencing complex (RISC) loading of the modified strand, as described in Song et al., (2017) Mol Ther Nucleic Acids 9:242-250, incorporated herein by reference in its entirety. In some embodiments, the antisense strand of the siRNA molecule comprises a 2′-OMe-phosphorodithioate modification, which increases RISC loading as described in Wu et al., (2014) Nat Commun 5:3459, incorporated herein by reference in its entirety.

[0452] In some embodiments, the sense strand of the siRNA molecule comprises a 5′-morpholino, which reduces RISC loading of the sense strand and improves antisense strand selection and RNAi activity, as described in Kumar et al., (2019) Chem Commun (Camb) 55(35):5139-5142, incorporated herein by reference in its entirety. In some embodiments, the sense strand of the siRNA molecule is modified with a synthetic RNA-like high affinity nucleotide analogue, Locked Nucleic Acid (LNA), which reduces RISC loading of the sense strand and further enhances antisense strand incorporation into RISC, as described in Elman et al., (2005) Nucleic Acids Res. 33(1): 439-447, incorporated herein by reference in its entirety. In some embodiments, the sense strand of the siRNA molecule comprises a 5′ unlocked nucleic acic (UNA) modification, which reduce RISC loading of the sense strand and improve silencing potentcy of the antisense strand, as described in Snead et al., (2013) Mol Ther Nucleic Acids 2(7):e103, incorporated herein by reference in its entirety. In some embodiments, the sense strand of the siRNA molecule comprises a 5-nitroindole modification, which decreased the RNAi potency of the sense strand and reduces off-target effects as described in Zhang et al., (2012) Chembiochem 13(13):1940-1945, incorporated herein by reference in its entirety. In some embodiments, the sense strand comprises a 2‘-O’methyl (2′-O-Me) modification, which reduces RISC loading and the off-target effects of the sense strand, as described in Zheng et al., FASEB (2013) 27(10): 4017-4026, incorporated herein by reference in its entirety. In some embodiments, the sense strand of the siRNA molecule is fully substituted with morpholino, 2′-MOE or 2′-O-Me residues, and are not recognized by RISC as described in Kole et al., (2012) Nature reviews. Drug Discovery 11(2):125-140, incorporated herein by reference in its entirety. In some embodiments the antisense strand of the siRNA molecule comprises a 2′-MOE modification and the sense strand comprises an 2′-O-Me modification (see e.g., Song et al., (2017) Mol Ther Nucleic Acids 9:242-250). In some embodiments at least one (e.g., at least 2, at least 3, at least 4, at least 5, at least 10) siRNA molecule is linked (e.g., covalently) to a muscle-targeting agent. In some embodiments, the muscle-targeting agent may comprise, or consist of, a nucleic acid (e.g., DNA or RNA), a peptide (e.g., an antibody), a lipid (e.g., a microvesicle), or a sugar moiety (e.g., a polysaccharide). In some embodiments, the muscle-targeting agent is an antibody. In some embodiments, the muscle-targeting agent is an anti-transferrin receptor antibody (e.g., any one of the anti-TfR antibodies provided herein). In some embodiments, the muscle-targeting agent may be linked to the 5′ end of the sense strand of the siRNA molecule. In some embodiments, the muscle-targeting agent may be linked to the 3′ end of the sense strand of the siRNA molecule. In some embodiments, the muscle-targeting agent may be linked internally to the sense strand of the siRNA molecule. In some embodiments, the muscle-targeting agent may be linked to the 5′ end of the antisense strand of the siRNA molecule. In some embodiments, the muscle-targeting agent may be linked to the 3′ end of the antisense strand of the siRNA molecule. In some embodiments, the muscle-targeting agent may be linked internally to the antisense strand of the siRNA molecule.

k. microRNA (miRNAs)

[0453] In some embodiments, an oligonucleotide may be a microRNA (miRNA). MicroRNAs (referred to as “miRNAs”) are small non-coding RNAs, belonging to a class of regulatory molecules that control gene expression by binding to complementary sites on a target RNA transcript. Typically, miRNAs are generated from large RNA precursors (termed pri-miRNAs) that are processed in the nucleus into approximately 70 nucleotide pre-miRNAs, which fold into imperfect stem-loop structures. These pre-miRNAs typically undergo an additional processing step within the cytoplasm where mature miRNAs of 18-25 nucleotides in length are excised from one side of the pre-miRNA hairpin by an RNase III enzyme, Dicer.

[0454] As used herein, miRNAs including pri-miRNA, pre-miRNA, mature miRNA or fragments of variants thereof that retain the biological activity of mature miRNA. In one embodiment, the size range of the miRNA can be from 21 nucleotides to 170 nucleotides. In one embodiment the size range of the miRNA is from 70 to 170 nucleotides in length. In another embodiment, mature miRNAs of from 21 to 25 nucleotides in length can be used.

[0455] l. Aptamers

[0456] In some embodiments, oligonucleotides provided herein may be in the form of aptamers. Generally, in the context of molecular payloads, aptamer is any nucleic acid that binds specifically to a target, such as a small molecule, protein, nucleic acid in a cell. In some embodiments, the aptamer is a DNA aptamer or an RNA aptamer. In some embodiments, a nucleic acid aptamer is a single-stranded DNA or RNA (ssDNA or ssRNA). It is to be understood that a single-stranded nucleic acid aptamer may form helices and/or (e.g., and) loop structures. The nucleic acid that forms the nucleic acid aptamer may comprise naturally occurring nucleotides, modified nucleotides, naturally occurring nucleotides with hydrocarbon linkers (e.g., an alkylene) or a polyether linker (e.g., a PEG linker) inserted between one or more nucleotides, modified nucleotides with hydrocarbon or PEG linkers inserted between one or more nucleotides, or a combination of thereof. Exemplary publications and patents describing aptamers and method of producing aptamers include, e.g., Lorsch and Szostak, 1996; Jayasena, 1999; U.S. Pat. Nos. 5,270,163; 5,567,588; 5,650,275; 5,670,637; 5,683,867; 5,696,249; 5,789,157; 5,843,653; 5,864,026; 5,989,823; 6,569,630; 8,318,438 and PCT application WO 99/31275, each incorporated herein by reference.

[0457] m. Ribozymes

[0458] In some embodiments, oligonucleotides provided herein may be in the form of a ribozyme. A ribozyme (ribonucleic acid enzyme) is a molecule, typically an RNA molecule, that is capable of performing specific biochemical reactions, similar to the action of protein enzymes. Ribozymes are molecules with catalytic activities including the ability to cleave at specific phosphodiester linkages in RNA molecules to which they have hybridized, such as mRNAs, RNA-containing substrates, lncRNAs, and ribozymes, themselves.

[0459] Ribozymes may assume one of several physical structures, one of which is called a “hammerhead.” A hammerhead ribozyme is composed of a catalytic core containing nine conserved bases, a double-stranded stem and loop structure (stem-loop II), and two regions complementary to the target RNA flanking regions the catalytic core. The flanking regions enable the ribozyme to bind to the target RNA specifically by forming double-stranded stems I and III. Cleavage occurs in cis (i.e., cleavage of the same RNA molecule that contains the hammerhead motif) or in trans (cleavage of an RNA substrate other than that containing the ribozyme) next to a specific ribonucleotide triplet by a transesterification reaction from a 3′, 5′-phosphate diester to a 2′, 3′-cyclic phosphate diester. Without wishing to be bound by theory, it is believed that this catalytic activity requires the presence of specific, highly conserved sequences in the catalytic region of the ribozyme.

[0460] Modifications in ribozyme structure have also included the substitution or replacement of various non-core portions of the molecule with non-nucleotidic molecules. For example, Benseler et al. (J. Am. Chem. Soc. (1993) 115:8483-8484) disclosed hammerhead-like molecules in which two of the base pairs of stem II, and all four of the nucleotides of loop II were replaced with non-nucleoside linkers based on hexaethylene glycol, propanediol, bis(triethylene glycol) phosphate, tris(propanediol)bisphosphate, or bis(propanediol) phosphate. Ma et al. (Biochem. (1993) 32:1751-1758; Nucleic Acids Res. (1993) 21:2585-2589) replaced the six nucleotide loop of the TAR ribozyme hairpin with non-nucleotidic, ethylene glycol-related linkers. Thomson et al. (Nucleic Acids Res. (1993) 21:5600-5603) replaced loop II with linear, non-nucleotidic linkers of 13, 17, and 19 atoms in length.

[0461] Ribozyme oligonucleotides can be prepared using well known methods (see, e.g., PCT Publications WO9118624; WO9413688; WO9201806; and WO 92/07065; and U.S. Pat. Nos. 5,436,143 and 5,650,502) or can be purchased from commercial sources (e.g., US Biochemicals) and, if desired, can incorporate nucleotide analogs to increase the resistance of the oligonucleotide to degradation by nucleases in a cell. The ribozyme may be synthesized in any known manner, e.g., by use of a commercially available synthesizer produced, e.g., by Applied Biosystems, Inc. or Milligen. The ribozyme may also be produced in recombinant vectors by conventional means. See, Molecular Cloning: A Laboratory Manual, Cold Spring Harbor Laboratory (Current edition). The ribozyme RNA sequences maybe synthesized conventionally, for example, by using RNA polymerases such as T7 or SP6.

[0462] n. Guide Nucleic Acids

[0463] In some embodiments, oligonucleotides are guide nucleic acid, e.g., guide RNA (gRNA) molecules. Generally, a guide RNA is a short synthetic RNA composed of (1) a scaffold sequence that binds to a nucleic acid programmable DNA binding protein (napDNAbp), such as Cas9, and (2) a nucleotide spacer portion that defines the DNA target sequence (e.g., genomic DNA target) to which the gRNA binds in order to bring the nucleic acid programmable DNA binding protein in proximity to the DNA target sequence. In some embodiments, the napDNAbp is a nucleic acid-programmable protein that forms a complex with (e.g., binds or associates with) one or more RNA(s) that targets the nucleic acid-programmable protein to a target DNA sequence (e.g., a target genomic DNA sequence). In some embodiments, a nucleic acid-programmable nuclease, when in a complex with an RNA, may be referred to as a nuclease:RNA complex. Guide RNAs can exist as a complex of two or more RNAs, or as a single RNA molecule.

[0464] Guide RNAs (gRNAs) that exist as a single RNA molecule may be referred to as single-guide RNAs (sgRNAs), though gRNA is also used to refer to guide RNAs that exist as either single molecules or as a complex of two or more molecules. Typically, gRNAs that exist as a single RNA species comprise two domains: (1) a domain that shares homology to a target nucleic acid (i.e., directs binding of a Cas9 complex to the target); and (2) a domain that binds a Cas9 protein. In some embodiments, domain (2) corresponds to a sequence known as a tracrRNA and comprises a stem-loop structure. In some embodiments, domain (2) is identical or homologous to a tracrRNA as provided in Jinek et al., Science 337:816-821 (2012), the entire contents of which is incorporated herein by reference.

[0465] In some embodiments, a gRNA comprises two or more of domains (1) and (2), and may be referred to as an extended gRNA. For example, an extended gRNA will bind two or more Cas9 proteins and bind a target nucleic acid at two or more distinct regions, as described herein. The gRNA comprises a nucleotide sequence that complements a target site, which mediates binding of the nuclease/RNA complex to said target site, providing the sequence specificity of the nuclease:RNA complex. In some embodiments, the RNA-programmable nuclease is the (CRISPR-associated system) Cas9 endonuclease, for example, Cas9 (Csn1) from Streptococcus pyogenes (see, e.g., “Complete genome sequence of an M1 strain of Streptococcus pyogenes.” Ferretti J. J., McShan W. M., Ajdic D. J., Savic D. J., Savic G., Lyon K., Primeaux C., Sezate S., Suvorov A. N., Kenton S., Lai H. S., Lin S. P., Qian Y., Jia H. G., Najar F. Z., Ren Q., Zhu H., Song L., White J., Yuan X., Clifton S. W., Roe B. A., McLaughlin R. E., Proc. Natl. Acad. Sci. U.S.A. 98:4658-4663 (2001); “CRISPR RNA maturation by trans-encoded small RNA and host factor RNase III.” Deltcheva E., Chylinski K., Sharma C. M., Gonzales K., Chao Y., Pirzada Z. A., Eckert M. R., Vogel J., Charpentier E., Nature 471:602-607 (2011); and “A programmable dual-RNA-guided DNA endonuclease in adaptive bacterial immunity.” Jinek M., Chylinski K., Fonfara I., Hauer M., Doudna J. A., Charpentier E. Science 337:816-821 (2012), the entire contents of each of which are incorporated herein by reference.

[0466] o. Multimers

[0467] In some embodiments, molecular payloads may comprise multimers (e.g., concatemers) of 2 or more oligonucleotides connected by a linker. In this way, in some embodiments, the oligonucleotide loading of a complex can be increased beyond the available linking sites on a targeting agent (e.g., available thiol sites on an antibody) or otherwise tuned to achieve a particular payload loading content. Oligonucleotides in a multimer can be the same or different (e.g., targeting different genes or different sites on the same gene or products thereof).

[0468] In some embodiments, multimers comprise 2 or more oligonucleotides linked together by a cleavable linker. However, in some embodiments, multimers comprise 2 or more oligonucleotides linked together by a non-cleavable linker. In some embodiments, a multimer comprises 2, 3, 4, 5, 6, 7, 8, 9, 10 or more oligonucleotides linked together. In some embodiments, a multimer comprises 2 to 5, 2 to 10 or 4 to 20 oligonucleotides linked together.

[0469] In some embodiments, a multimer comprises 2 or more oligonucleotides linked end-to-end (in a linear arrangement). In some embodiments, a multimer comprises 2 or more oligonucleotides linked end-to-end via a oligonucleotide based linker (e.g., poly-dT linker, an abasic linker). In some embodiments, a multimer comprises a 5′ end of one oligonucleotide linked to a 3′ end of another oligonucleotide. In some embodiments, a multimer comprises a 3′ end of one oligonucleotide linked to a 3′ end of another oligonucleotide. In some embodiments, a multimer comprises a 5′ end of one oligonucleotide linked to a 5′ end of another oligonucleotide. Still, in some embodiments, multimers can comprise a branched structure comprising multiple oligonucleotides linked together by a branching linker.

[0470] Further examples of multimers that may be used in the complexes provided herein are disclosed, for example, in US Patent Application Number 2015/0315588 A1, entitled Methods of delivering multiple targeting oligonucleotides to a cell using cleavable linkers, which was published on Nov. 5, 2015; US Patent Application Number 2015/0247141 A1, entitled Multimeric Oligonucleotide Compounds, which was published on Sep. 3, 2015, US Patent Application Number US 2011/0158937 A1, entitled Immunostimulatory Oligonucleotide Multimers, which was published on Jun. 30, 2011; and U.S. Pat. No. 5,693,773, entitled Triplex-Forming Antisense Oligonucleotides Having Abasic Linkers Targeting Nucleic Acids Comprising Mixed Sequences Of Purines And Pyrimidines, which issued on Dec. 2, 1997, the contents of each of which are incorporated herein by reference in their entireties.

[0471] ii. Small Molecules:

[0472] Any suitable small molecule may be used as a molecular payload, as described herein. In some embodiments, the small molecule enhances exon skipping of DMD mutant sequences. In some embodiments, the small molecule is as described in US Patent Application Publication US20140080896A1, published Mar. 20, 2014, entitled “IDENTIFICATION OF SMALL MOLECULES THAT FACILITATE THERAPEUTIC EXON SKIPPING”. Further examples of small molecule payloads are provided in U.S. Pat. No. 9,982,260, issued May 29, 2018, entitled “Identification of structurally similar small molecules that enhance therapeutic exon skipping”. For example, in some embodiments, the small molecule is an enhancer of exon skipping such as perphenazine, flupentixol, zuclopenthixol or corynanthine. In some embodiments, a small molecule enhancer of exon skipping inhibits the ryanodine receptor or calmodulin. In some embodiments, the small molecule is an H-Ras pathway inhibitor such as manumycin A. In some embodiments, the small molecule is a suppressor of stop codons and desensitizes ribosomes to premature stop codons. In some embodiments, the small molecule is ataluren, as described in McElroy S. P. et al. “A Lack of Premature Termination Codon Read Through Efficacy of PTC124 (Ataluren) in a Diverse Array of Reporter Assays.” PLOS Biology, published Jun. 25, 2013. In some embodiments, the small molecule is a corticosteroid, e.g., as described in Manzur, A. Y. et al. “Glucocorticoid corticosteroids for Duchenne muscular dystrophy”. Cochrane Database Syst Rev. 2004;(2):CD003725. In some embodiments, the small molecule upregulates the expression and/or (e.g., and) activity of genes that can replace the function of dystrophin, such as utrophin. In some embodiments, a utrophin modulator is as described in International Publication No. WO2007091106, published Aug. 16, 2007, entitled “TREATMENT OF DUCHENNE MUSCULAR DYSTROPHY” and/or (e.g., and) International Publication No. WO/2017/168151, published Oct. 5, 2017, entitled “COMPOSITION FOR THE TREATMENT OF DUCHENNE MUSCULAR DYSTROPHY”.

[0473] iii. Peptides/Proteins

[0474] Any suitable peptide or protein may be used as a molecular payload, as described herein. In some embodiments, a protein is an enzyme. In some embodiments, peptides or proteins may be produced, synthesized, and/or (e.g., and) derivatized using several methodologies, e.g. phage displayed peptide libraries, one-bead one-compound peptide libraries, or positional scanning synthetic peptide combinatorial libraries. Exemplary methodologies have been characterized in the art and are incorporated by reference (Gray, B. P. and Brown, K. C. “Combinatorial Peptide Libraries: Mining for Cell-Binding Peptides” Chem Rev. 2014, 114:2, 1020-1081.; Samoylova, T. I. and Smith, B. F. “Elucidation of muscle-binding peptides by phage display screening.” Muscle Nerve, 1999, 22:4. 460-6.).

[0475] In some embodiments, a peptide may facilitate exon skipping in an mRNA expressed from a mutated DMD allele. In some embodiments, a peptide may promote the expression of functional dystrophin and/or (e.g., and) the expression of a protein capable of functioning in place of dystrophin. In some embodiments, payload is a protein that is a functional fragment of dystrophin, e.g. an amino acid segment of a functional dystrophin protein.

[0476] In some embodiments, the peptide or protein comprises at least one zinc finger.

[0477] In some embodiments, the peptide or protein may comprise about 2-25 amino acids, about 2-20 amino acids, about 2-15 amino acids, about 2-10 amino acids, or about 2-5 amino acids. The peptide or protein may comprise naturally-occurring amino acids, e.g. cysteine, alanine, or non-naturally-occurring or modified amino acids. Non-naturally occurring amino acids include 3-amino acids, homo-amino acids, proline derivatives, 3-substituted alanine derivatives, linear core amino acids, N-methyl amino acids, and others known in the art. In some embodiments, the peptide may be linear; in other embodiments, the peptide may be cyclic, e.g. bicyclic.

[0478] iv. Nucleic Acid Constructs

[0479] Any suitable gene expression construct may be used as a molecular payload, as described herein. In some embodiments, a gene expression construct may be a vector or a cDNA fragment. In some embodiments, a gene expression construct may be messenger RNA (mRNA). In some embodiments, a mRNA used herein may be a modified mRNA, e.g., as described in U.S. Pat. No. 8,710,200, issued on Apr. 24, 2014, entitled “Engineered nucleic acids encoding a modified erythropoietin and their expression”. In some embodiments, a mRNA may comprise a 5′ methyl cap. In some embodiments, a mRNA may comprise a polyA tail, optionally of up to 160 nucleotides in length. A gene expression construct may encode a sequence of a dystrophin protein, a dystrophin fragment, a mini-dystrophin, a utrophin protein, or any protein that shares a common function with dystrophin. In some embodiments, the gene expression construct may be expressed, e.g., overexpressed, within the nucleus of a muscle cell. In some embodiments, the gene expression constructs encodes a protein that comprises at least one zinc finger. In some embodiments, the gene expression construct encodes a protein that promotes the expression of dystrophin or a protein that shares function with dystrophin, e.g., utrophin. In some embodiments, the gene expression construct encodes a gene editing enzyme. In some embodiments, the gene expression construct is as described in U.S. Patent Application Publication US20170368198A1, published Dec. 28, 2017, entitled “Optimized mini-dystrophin genes and expression cassettes and their use”; Duan D. “Myodys, a full-length dystrophin plasmid vector for Duchenne and Becker muscular dystrophy gene therapy.” Curr Opin Mol Ther 2008; 10:86-94; and expression cassettes disclosed in Tang, Y. et al., “AAV-directed muscular dystrophy gene therapy” Expert Opin Biol Ther. 2010 Mar.;10(3):395-408; the contents of each of which are incorporated herein by reference in their entireties.

[0480] C. Linkers

[0481] Complexes described herein generally comprise a linker that connects any one of the anti-TfR antibodies described herein to a molecular payload. A linker comprises at least one covalent bond. In some embodiments, a linker may be a single bond, e.g., a disulfide bond or disulfide bridge, that connects an anti-TfR antibody to a molecular payload. However, in some embodiments, a linker may connect any one of the anti-TfR antibodies described herein to a molecular payload through multiple covalent bonds. In some embodiments, a linker may be a cleavable linker. However, in some embodiments, a linker may be a non-cleavable linker. A linker is generally stable in vitro and in vivo, and may be stable in certain cellular environments. Additionally, generally a linker does not negatively impact the functional properties of either the anti-TfR antibody or the molecular payload. Examples and methods of synthesis of linkers are known in the art (see, e.g. Kline, T. et al. “Methods to Make Homogenous Antibody Drug Conjugates.” Pharmaceutical Research, 2015, 32:11, 3480-3493.; Jain, N. et al. “Current ADC Linker Chemistry” Pharm Res. 2015, 32:11, 3526-3540.; McCombs, J. R. and Owen, S. C. “Antibody Drug Conjugates: Design and Selection of Linker, Payload and Conjugation Chemistry” AAPS J. 2015, 17:2, 339-351.).

[0482] A precursor to a linker typically will contain two different reactive species that allow for attachment to both the anti-TfR antibody and a molecular payload. In some embodiments, the two different reactive species may be a nucleophile and/or (e.g., and) an electrophile. In some embodiments, a linker is connected to an anti-TfR antibody via conjugation to a lysine residue or a cysteine residue of the anti-TfR antibody. In some embodiments, a linker is connected to a cysteine residue of an anti-TfR antibody via a maleimide-containing linker, wherein optionally the maleimide-containing linker comprises a maleimidocaproyl or maleimidomethyl cyclohexane-1-carboxylate group. In some embodiments, a linker is connected to a cysteine residue of an anti-TfR antibody or thiol functionalized molecular payload via a 3-arylpropionitrile functional group. In some embodiments, a linker is connected to a lysine residue of an anti-TfR antibody. In some embodiments, a linker is connected to an anti-TfR antibody and/or (e.g., and) a molecular payload via an amide bond, a carbamate bond, a hydrazide, a trizaole, a thioether, or a disulfide bond.

[0483] i. Cleavable Linkers

[0484] A cleavable linker may be a protease-sensitive linker, a pH-sensitive linker, or a glutathione-sensitive linker. These linkers are generally cleavable only intracellularly and are preferably stable in extracellular environments, e.g. extracellular to a muscle cell.

[0485] Protease-sensitive linkers are cleavable by protease enzymatic activity. These linkers typically comprise peptide sequences and may be 2-10 amino acids, about 2-5 amino acids, about 5-10 amino acids, about 10 amino acids, about 5 amino acids, about 3 amino acids, or about 2 amino acids in length. In some embodiments, a peptide sequence may comprise naturally-occurring amino acids, e.g. cysteine, alanine, or non-naturally-occurring or modified amino acids. Non-naturally occurring amino acids include 3-amino acids, homo-amino acids, proline derivatives, 3-substituted alanine derivatives, linear core amino acids, N-methyl amino acids, and others known in the art. In some embodiments, a protease-sensitive linker comprises a valine-citrulline or alanine-citrulline dipeptide sequence. In some embodiments, a protease-sensitive linker can be cleaved by a lysosomal protease, e.g. cathepsin B, and/or (e.g., and) an endosomal protease.

[0486] A pH-sensitive linker is a covalent linkage that readily degrades in high or low pH environments. In some embodiments, a pH-sensitive linker may be cleaved at a pH in a range of 4 to 6. In some embodiments, a pH-sensitive linker comprises a hydrazone or cyclic acetal. In some embodiments, a pH-sensitive linker is cleaved within an endosome or a lysosome.

[0487] In some embodiments, a glutathione-sensitive linker comprises a disulfide moiety. In some embodiments, a glutathione-sensitive linker is cleaved by a disulfide exchange reaction with a glutathione species inside a cell. In some embodiments, the disulfide moiety further comprises at least one amino acid, e.g. a cysteine residue.

[0488] In some embodiments, the linker is a Val-cit linker (e.g., as described in U.S. Pat. No. 6,214,345, incorporated herein by reference). In some embodiments, before conjugation, the val-cit linker has a structure of:

[chemical structure]

[0489] In some embodiments, after conjugation, the val-cit linker has a structure of:

[chemical structure]

[0490] In some embodiments, the Val-cit linker is attached to a reactive chemical moiety (e.g., SPAAC for click chemistry conjugation). In some embodiments, before click chemistry conjugation, the val-cit linker attached to a reactive chemical moiety (e.g., SPAAC for click chemistry conjugation) has the structure of:

[chemical structure]

wherein n is any number from 0-10. In some embodiments, n is 3.

[0491] In some embodiments, the val-cit linker attached to a reactive chemical moiety (e.g., SPAAC for click chemistry conjugation) is conjugated (e.g., via a different chemical moiety) to a molecular payload (e.g., an oligonucleotide). In some embodiments, the val-cit linker attached to a reactive chemical moiety (e.g., SPAAC for click chemistry conjugation) and conjugated to a molecular payload (e.g., an oligonucleotide) has the structure of (before click chemistry conjugation):

[chemical structure]

wherein n is any number from 0-10. In some embodiments, n is 3.

[0492] In some embodiments, after conjugation to a molecular payload (e.g., an oligonucleotide), the val-cit linker has a structure of:

[chemical structure]

wherein n is any number from 0-10, and wherein m is any number from 0-10. In some embodiments, n is 3 and m is 4.

[0493] ii. Non-Cleavable Linkers

[0494] In some embodiments, non-cleavable linkers may be used. Generally, a non-cleavable linker cannot be readily degraded in a cellular or physiological environment. In some embodiments, a non-cleavable linker comprises an optionally substituted alkyl group, wherein the substitutions may include halogens, hydroxyl groups, oxygen species, and other common substitutions. In some embodiments, a linker may comprise an optionally substituted alkyl, an optionally substituted alkylene, an optionally substituted arylene, a heteroarylene, a peptide sequence comprising at least one non-natural amino acid, a truncated glycan, a sugar or sugars that cannot be enzymatically degraded, an azide, an alkyne-azide, a peptide sequence comprising a LPXT sequence, a thioether, a biotin, a biphenyl, repeating units of polyethylene glycol or equivalent compounds, acid esters, acid amides, sulfamides, and/or (e.g., and) an alkoxy-amine linker. In some embodiments, sortase-mediated ligation will be utilized to covalently link an anti-TfR antibody comprising a LPXT sequence to a molecular payload comprising a (G)ₙ sequence (see, e.g. Proft T. Sortase-mediated protein ligation: an emerging biotechnology tool for protein modification and immobilization. Biotechnol Lett. 2010, 32(1):1-10.).

[0495] In some embodiments, a linker may comprise a substituted alkylene, an optionally substituted alkenylene, an optionally substituted alkynylene, an optionally substituted cycloalkylene, an optionally substituted cycloalkenylene, an optionally substituted arylene, an optionally substituted heteroarylene further comprising at least one heteroatom selected from N, O, and S, an optionally substituted heterocyclylene further comprising at least one heteroatom selected from N, O, and S, an imino, an optionally substituted nitrogen species, an optionally substituted oxygen species 0, an optionally substituted sulfur species, or a poly(alkylene oxide), e.g. polyethylene oxide or polypropylene oxide.

[0496] iii. Linker conjugation

[0497] In some embodiments, a linker is connected to an anti-TfR antibody and/or (e.g., and) molecular payload via a phosphate, thioether, ether, carbon-carbon, carbamate, or amide bond. In some embodiments, a linker is connected to an oligonucleotide through a phosphate or phosphorothioate group, e.g. a terminal phosphate of an oligonucleotide backbone. In some embodiments, a linker is connected to an anti-TfR antibody, through a lysine or cysteine residue present on the anti-TfR antibody.

[0498] In some embodiments, a linker is connected to an anti-TfR antibody and/or (e.g., and) molecular payload by a cycloaddition reaction between an azide and an alkyne to form a triazole, wherein the azide and the alkyne may be located on the anti-TfR antibody, molecular payload, or the linker. In some embodiments, an alkyne may be a cyclic alkyne, e.g., a cyclooctyne. In some embodiments, an alkyne may be bicyclononyne (also known as bicyclo[6.1.0]nonyne or BCN) or substituted bicyclononyne. In some embodiments, a cyclooctane is as described in International Patent Application Publication WO2011136645, published on Nov. 3, 2011, entitled, “Fused Cyclooctyne Compounds And Their Use In Metal-free Click Reactions”. In some embodiments, an azide may be a sugar or carbohydrate molecule that comprises an azide. In some embodiments, an azide may be 6-azido-6-deoxygalactose or 6-azido-N-acetylgalactosamine. In some embodiments, a sugar or carbohydrate molecule that comprises an azide is as described in International Patent Application Publication WO2016170186, published on Oct. 27, 2016, entitled, “Process For The Modification Of A Glycoprotein Using A Glycosyltransferase That Is Or Is Derived From A P(1,4)-N-Acetylgalactosaminyltransferase”. In some embodiments, a cycloaddition reaction between an azide and an alkyne to form a triazole, wherein the azide and the alkyne may be located on the anti-TfR antibody, molecular payload, or the linker is as described in International Patent Application Publication WO2014065661, published on May 1, 2014, entitled, “Modified antibody, antibody-conjugate and process for the preparation thereof”; or International Patent Application Publication WO2016170186, published on Oct. 27, 2016, entitled, “Process For The Modification Of A Glycoprotein Using A Glycosyltransferase That Is Or Is Derived From A P(1,4)-N-Acetylgalactosaminyltransferase”.

[0499] In some embodiments, a linker further comprises a spacer, e.g., a polyethylene glycol spacer or an acyl/carbomoyl sulfamide spacer, e.g., a HydraSpace™ spacer. In some embodiments, a spacer is as described in Verkade, J. M. M. et al., “A Polar Sulfamide Spacer Significantly Enhances the Manufacturability, Stability, and Therapeutic Index of Antibody-Drug Conjugates”, Antibodies, 2018, 7, 12.

[0500] In some embodiments, a linker is connected to an anti-TfR antibody and/or (e.g., and) molecular payload by the Diels-Alder reaction between a dienophile and a diene/hetero-diene, wherein the dienophile and the diene/hetero-diene may be located on the anti-TfR antibody, molecular payload, or the linker. In some embodiments a linker is connected to an anti-TfR antibody and/or (e.g., and) molecular payload by other pericyclic reactions, e.g. ene reaction. In some embodiments, a linker is connected to an anti-TfR antibody and/or (e.g., and) molecular payload by an amide, thioamide, or sulfonamide bond reaction. In some embodiments, a linker is connected to an anti-TfR antibody and/or (e.g., and) molecular payload by a condensation reaction to form an oxime, hydrazone, or semicarbazide group existing between the linker and the anti-TfR antibody and/or (e.g., and) molecular payload.

[0501] In some embodiments, a linker is connected to an anti-TfR antibody and/or (e.g., and) molecular payload by a conjugate addition reactions between a nucleophile, e.g. an amine or a hydroxyl group, carbonate, and an electrophile, e.g. a carboxylic acid or an aldehyde. In some embodiments, a nucleophile may exist on a linker and an electrophile may exist on an anti-TfR antibody or molecular payload prior to a reaction between a linker and an anti-TfR antibody or molecular payload. In some embodiments, an electrophile may exist on a linker and a nucleophile may exist on an anti-TfR antibody or molecular payload prior to a reaction between a linker and an anti-TfR antibody or molecular payload. In some embodiments, an electrophile may be an azide, pentafluorophenyl, a silicon centers, a carbonyl, a carboxylic acid, an anhydride, an isocyanate, a thioisocyanate, a succinimidyl ester, a sulfosuccinimidyl ester, a maleimide, an alkyl halide, an alkyl pseudohalide, an epoxide, an episulfide, an aziridine, an aryl, an activated phosphorus center, and/or (e.g., and) an activated sulfur center. In some embodiments, a nucleophile may be an optionally substituted alkene, an optionally substituted alkyne, an optionally substituted aryl, an optionally substituted heterocyclyl, a hydroxyl group, an amino group, an alkylamino group, an anilido group, or a thiol group.

[0502] In some embodiments, the val-cit linker attached to a reactive chemical moiety (e.g., SPAAC for click chemistry conjugation) is conjugated to the anti-TfR antibody by a structure of:

[chemical structure]

wherein m is any number from 0-10. In some embodiments, m is 4.

[0503] In some embodiments, the val-cit linker attached to a reactive chemical moiety (e.g., SPAAC for click chemistry conjugation) is conjugated to an anti-TfR antibody having a structure of:

[chemical structure]

wherein m is any number from 0-10. In some embodiments, m is 4.

[0504] In some embodiments, the val-cit linker attached to a reactive chemical moiety (e.g., SPAAC for click chemistry conjugation) and conjugated to an anti-TfR antibody has a structure of:

[chemical structure]

wherein n is any number from 0-10, wherein m is any number from 0-10. In some embodiments, n is 3 and/or (e.g., and) m is 4.

[0505] In some embodiments, the val-cit linker used to covalently link an anti-TfR antibody and a molecular payload (e.g., an oligonucleotide) has a structure of:

[chemical structure]

wherein n is 3 and m is 4.

[0506] In some embodiments, the val-cit linker that links the antibody and the molecular payload has a structure of:

[chemical structure]

wherein n is any number from 0-10, wherein m is any number from 0-10. In some embodiments, n is 3 and/or (e.g., and) m is 4. In some embodiments, n is 3 and/or (e.g., and) m is 4. In some embodiments, X is NH (e.g., NH from an amine group of a lysine), S (e.g., S from a thiol group of a cysteine), or 0 (e.g., 0 from a hydroxyl group of a serine, threonine, or tyrosine) of the antibody.

[0507] In some embodiments, the complex described herein has a structure of:

[chemical structure]

wherein n is any number from 0-10, wherein m is any number from 0-10. In some embodiments, n is 3 and/or (e.g., and) m is 4.

[0508] In structures formula (A), (B), (C), and (D), L1, in some embodiments, is a spacer that is a substituted or unsubstituted aliphatic, substituted or unsubstituted heteroaliphatic, substituted or unsubstituted carbocyclylene, substituted or unsubstituted heterocyclylene, substituted or unsubstituted arylene, substituted or unsubstituted heteroarylene, —O—, —N(R^{A})—, —S—, —C(═O)—, —C(═O)O—, —C(═O)NR^{A}—, —NR^{A}C(═O)—, —NR^{A}C(═O)R^{A}—, —C(═O)R^{A}—, —NR^{A}C(═O)O—, —NR^{A}C(═O)N(R^{A})—, —OC(═O)—, —OC(═O)O—, —OC(═O)N(R^{A})—, —S(O)₂NR^{A}—, —NR^{A}S(O)₂—, or a combination thereof. In some embodiments, L1 is

[chemical structure]

wherein the piperazine moiety links to the oligonucleotide, wherein L2 is

[chemical structure]

[0509] In some embodiments, L1 is:

[chemical structure]

wherein the piperazine moiety links to the oligonucleotide.

[chemical structure]

[0510] In some embodiments, L1 is

[0511] In some embodiments, L1 is linked to a 5′ phosphate of the oligonucleotide.

[0512] In some embodiments, L1 is optional (e.g., need not be present).

[0513] In some embodiments, any one of the complexes described herein has a structure of:

[chemical structure]

wherein n is 0-15 (e.g., 3) and m is 0-15 (e.g., 4).

### C. Examples of Antibody-Molecular Payload Complexes

[0514] Further provided herein are non-limiting examples of complexes comprising any one the anti-TfR antibodies described herein covalently linked to any of the molecular payloads (e.g., an oligonucleotide) described herein. In some embodiments, the anti-TfR antibody (e.g., any one of the anti-TfR antibodies provided in Table 2) is covalently linked to a molecular payload (e.g., an oligonucleotide) via a linker. Any of the linkers described herein may be used. In some embodiments, if the molecular payload is an oligonucleotide, the linker is linked to the 5′ end, the 3′ end, or internally of the oligonucleotide. In some embodiments, the linker is linked to the anti-TfR antibody via a thiol-reactive linkage (e.g., via a cysteine in the anti-TfR antibody). In some embodiments, the linker (e.g., a Val-cit linker) is linked to the antibody (e.g., an anti-TfR antibody described herein) via an amine group (e.g., via a lysine in the antibody). In some embodiments, the molecular payload is a DMD targeting oligonucleotide (e.g., an oligonucleotide listed in Table 14). In some embodiments, the molecular payload is a DMD targeting oligonucleotide (e.g., an oligonucleotide provided by any one of SEQ ID NO: 437-1241, or complementary to any one of SEQ ID NO: 1242-2046).

[0515] An example of a structure of a complex comprising an anti-TfR antibody covalently linked to a molecular payload via a Val-cit linker is provided below:

[chemical structure]

wherein the linker is linked to the antibody via a thiol-reactive linkage (e.g., via a cysteine in the antibody). In some embodiments, the molecular payload is a DMD targeting oligonucleotide (e.g., an oligonucleotide listed in Table 14). In some embodiments, the molecular payload is a DMD targeting oligonucleotide (e.g., an oligonucleotide provided by any one of SEQ ID NO: 437-1241, or complementary to any one of SEQ ID NO: 1242-2046).

[0516] Another example of a structure of a complex comprising an anti-TfR antibody covalently linked to a molecular payload via a Val-cit linker is provided below:

[chemical structure]

wherein n is a number between 0-10, wherein m is a number between 0-10, wherein the linker is linked to the antibody via an amine group (e.g., on a lysine residue), and/or (e.g., and) wherein the linker is linked to the oligonucleotide (e.g., at the 5′ end, 3′ end, or internally). In some embodiments, the linker is linked to the antibody via a lysine, the linker is linked to the oligonucleotide at the 5′ end, n is 3, and m is 4. In some embodiments, the molecular payload is an oligonucleotide comprising a sense strand and an antisense strand, and, the linker is linked to the sense strand or the antisense strand at the 5′ end or the 3′ end.

[0517] It should be appreciated that antibodies can be linked to molecular payloads with different stochiometries, a property that may be referred to as a drug to antibody ratios (DAR) with the “drug” being the molecular payload. In some embodiments, one molecular payload is linked to an antibody (DAR=1). In some embodiments, two molecular payloads are linked to an antibody (DAR=2). In some embodiments, three molecular payloads are linked to an antibody (DAR=3). In some embodiments, four molecular payloads are linked to an antibody (DAR=4). In some embodiments, a mixture of different complexes, each having a different DAR, is provided. In some embodiments, an average DAR of complexes in such a mixture may be in a range of 1 to 3, 1 to 4, 1 to 5 or more. DAR may be increased by conjugating molecular payloads to different sites on an antibody and/or (e.g., and) by conjugating multimers to one or more sites on antibody. For example, a DAR of 2 may be achieved by conjugating a single molecular payload to two different sites on an antibody or by conjugating a dimer molecular payload to a single site of an antibody.

[0518] In some embodiments, the complex described herein comprises an anti-TfR antibody described herein (e.g., the 3-A4, 3-M12, and 5-H12 antibodies provided in Table 2 in an IgG or Fab form) covalently linked to a molecular payload. In some embodiments, the complex described herein comprises an anti-TfR antibody described herein (e.g., the 3-A4, 3-M12, and 5-H12 antibodies provided in Table 2 in an IgG or Fab form) covalently linked to molecular payload via a linker (e.g., a Val-cit linker). In some embodiments, the linker (e.g., a Val-cit linker) is linked to the antibody (e.g., an anti-TfR antibody described herein) via a thiol-reactive linkage (e.g., via a cysteine in the antibody). In some embodiments, the linker (e.g., a Val-cit linker) is linked to the antibody (e.g., an anti-TfR antibody described herein) via an amine group (e.g., via a lysine in the antibody). In some embodiments, the molecular payload is a DMD targeting oligonucleotide (e.g., an oligonucleotide listed in Table 14). In some embodiments, the molecular payload is a DMD targeting oligonucleotide (e.g., an oligonucleotide provided by any one of SEQ ID NO: 437-1241, or complementary to any one of SEQ ID NO: 1242-2046).

[0519] In some embodiments, in any one of the examples of complexes described herein, the molecular payload is a DMD targeting oligonucleotide comprising a region of complementarity of at least 15 consecutive nucleotides to a target sequence provided by any one of SEQ ID NO: 1242-2046. In some embodiments, in any one of the examples of complexes described herein, the molecular payload is a DMD targeting oligonucleotide comprising a region of at least 15 consecutive nucleotides of any one of SEQ ID NO: 437-1241. In some embodiments, in any one of the examples of complexes described herein, the molecular payload is a DMD targeting oligonucleotide comprising a region of complementarity of at least 5 consecutive nucleotides of an ESE listed in Table 15. In some embodiments, in any one of the examples of complexes described herein, the molecular payload is a DMD targeting oligonucleotide selected from the oligonucleotides listed in Table 14. In some embodiments, in any one of the examples of complexes described herein, the molecular payload is a DMD targeting oligonucleotide selected from the oligonucleotides provided by any one of SEQ ID NO: 437-1241, or complementary to any one of SEQ ID NO: 1242-2046.

[0520] In some embodiments, the complex described herein comprises an anti-TfR antibody covalently linked to a molecular payload, wherein the anti-TfR antibody comprises a CDR-H1, a CDR-H2, and a CDR-H3 that are the same as the CDR-H1, CDR-H2, and CDR-H3 shown in Table 2; and a CDR-L1, a CDR-L2, and a CDR-L3 that are the same as the CDR-L1, CDR-L2, and CDR-L3 shown in Table 2. In some embodiments, the molecular payload is a DMD targeting oligonucleotide (e.g., an oligonucleotide listed in Table 14). In some embodiments, the molecular payload is an oligonucleotide provided by any one of SEQ ID NO: 437-1241, or complementary to any one of SEQ ID NO: 1242-2046.

[0521] In some embodiments, the complex described herein comprises an anti-TfR antibody covalently linked to a molecular payload, wherein the anti-TfR antibody comprises a VH comprising the amino acid sequence of SEQ ID NO: 69, SEQ ID NO: 71, or SEQ ID NO: 72, and a VL comprising the amino acid sequence of SEQ ID NO: 70. In some embodiments, the molecular payload is a DMD targeting oligonucleotide (e.g., an oligonucleotide listed in Table 14). In some embodiments, the molecular payload is an oligonucleotide provided by any one of SEQ ID NO: 437-1241, or complementary to any one of SEQ ID NO: 1242-2046.

[0522] In some embodiments, the complex described herein comprises an anti-TfR antibody covalently linked to a molecular payload, wherein the anti-TfR antibody comprises a VH comprising the amino acid sequence of SEQ ID NO: 73 or SEQ ID NO: 76, and a VL comprising the amino acid sequence of SEQ ID NO: 74. In some embodiments, the molecular payload is a DMD targeting oligonucleotide (e.g., an oligonucleotide listed in Table 14). In some embodiments, the molecular payload is an oligonucleotide provided by any one of SEQ ID NO: 437-1241, or complementary to any one of SEQ ID NO: 1242-2046.

[0523] In some embodiments, the complex described herein comprises an anti-TfR antibody covalently linked to a molecular payload, wherein the anti-TfR antibody comprises a VH comprising the amino acid sequence of SEQ ID NO: 73 or SEQ ID NO: 76, and a VL comprising the amino acid sequence of SEQ ID NO: 75. In some embodiments, the molecular payload is a DMD targeting oligonucleotide (e.g., an oligonucleotide listed in Table 14). In some embodiments, the molecular payload is an oligonucleotide provided by any one of SEQ ID NO: 437-1241, or complementary to any one of SEQ ID NO: 1242-2046.

[0524] In some embodiments, the complex described herein comprises an anti-TfR antibody covalently linked to a molecular payload, wherein the anti-TfR antibody comprises a VH comprising the amino acid sequence of SEQ ID NO: 77, and a VL comprising the amino acid sequence of SEQ ID NO: 78. In some embodiments, the molecular payload is a DMD targeting oligonucleotide (e.g., an oligonucleotide listed in Table 14). In some embodiments, the molecular payload is an oligonucleotide provided by any one of SEQ ID NO: 437-1241, or complementary to any one of SEQ ID NO: 1242-2046.

[0525] In some embodiments, the complex described herein comprises an anti-TfR antibody covalently linked to a molecular payload, wherein the anti-TfR antibody comprises a VH comprising the amino acid sequence of SEQ ID NO: 77 or SEQ ID NO: 79, and a VL comprising the amino acid sequence of SEQ ID NO: 80. In some embodiments, the molecular payload is a DMD targeting oligonucleotide (e.g., an oligonucleotide listed in Table 14). In some embodiments, the molecular payload is an oligonucleotide provided by any one of SEQ ID NO: 437-1241, or complementary to any one of SEQ ID NO: 1242-2046.

[0526] In some embodiments, the complex described herein comprises an anti-TfR antibody covalently linked to a molecular payload, wherein the anti-TfR antibody comprises a heavy chain comprising the amino acid sequence of SEQ ID NO: 84, SEQ ID NO: 86 or SEQ ID NO: 87 and a light chain comprising the amino acid sequence of SEQ ID NO: 85. In some embodiments, the molecular payload is a DMD targeting oligonucleotide (e.g., an oligonucleotide listed in Table 14). In some embodiments, the molecular payload is an oligonucleotide provided by any one of SEQ ID NO: 437-1241, or complementary to any one of SEQ ID NO: 1242-2046.

[0527] In some embodiments, the complex described herein comprises an anti-TfR antibody covalently linked to a molecular payload, wherein the anti-TfR antibody comprises a heavy chain comprising the amino acid sequence of SEQ ID NO: 88 or SEQ ID NO: 91, and a light chain comprising the amino acid sequence of SEQ ID NO: 89. In some embodiments, the molecular payload is a DMD targeting oligonucleotide (e.g., an oligonucleotide listed in Table 14). In some embodiments, the molecular payload is an oligonucleotide provided by any one of SEQ ID NO: 437-1241, or complementary to any one of SEQ ID NO: 1242-2046.

[0528] In some embodiments, the complex described herein comprises an anti-TfR antibody covalently linked to a molecular payload, wherein the anti-TfR antibody comprises a heavy chain comprising the amino acid sequence of SEQ ID NO: 88 or SEQ ID NO: 91, and a light chain comprising the amino acid sequence of SEQ ID NO: 90. In some embodiments, the molecular payload is a DMD targeting oligonucleotide (e.g., an oligonucleotide listed in Table 14). In some embodiments, the molecular payload is an oligonucleotide provided by any one of SEQ ID NO: 437-1241, or complementary to any one of SEQ ID NO: 1242-2046.

[0529] In some embodiments, the complex described herein comprises an anti-TfR antibody covalently linked to a molecular payload, wherein the anti-TfR antibody comprises a heavy chain comprising the amino acid sequence of SEQ ID NO: 92 or SEQ ID NO: 94, and a light chain comprising the amino acid sequence of SEQ ID NO: 95. In some embodiments, the molecular payload is a DMD targeting oligonucleotide (e.g., an oligonucleotide listed in Table 14). In some embodiments, the molecular payload is an oligonucleotide provided by any one of SEQ ID NO: 437-1241, or complementary to any one of SEQ ID NO: 1242-2046.

[0530] In some embodiments, the complex described herein comprises an anti-TfR antibody covalently linked to a molecular payload, wherein the anti-TfR antibody comprises a heavy chain comprising the amino acid sequence of SEQ ID NO: 92, and a light chain comprising the amino acid sequence of SEQ ID NO: 93. In some embodiments, the molecular payload is a DMD targeting oligonucleotide (e.g., an oligonucleotide listed in Table 14). In some embodiments, the molecular payload is an oligonucleotide provided by any one of SEQ ID NO: 437-1241, or complementary to any one of SEQ ID NO: 1242-2046.

[0531] In some embodiments, the complex described herein comprises an anti-TfR antibody covalently linked to a molecular payload, wherein the anti-TfR antibody comprises a heavy chain comprising the amino acid sequence of SEQ ID NO: 97, SEQ ID NO: 98, or SEQ ID NO: 99 and a VL comprising the amino acid sequence of SEQ ID NO: 85. In some embodiments, the molecular payload is a DMD targeting oligonucleotide (e.g., an oligonucleotide listed in Table 14). In some embodiments, the molecular payload is an oligonucleotide provided by any one of SEQ ID NO: 437-1241, or complementary to any one of SEQ ID NO: 1242-2046.

[0532] In some embodiments, the complex described herein comprises an anti-TfR antibody covalently linked to a molecular payload, wherein the anti-TfR antibody comprises a heavy chain comprising the amino acid sequence of SEQ ID NO: 100 or SEQ ID NO: 101 and a light chain comprising the amino acid sequence of SEQ ID NO: 89. In some embodiments, the molecular payload is a DMD targeting oligonucleotide (e.g., an oligonucleotide listed in Table 14). In some embodiments, the molecular payload is an oligonucleotide provided by any one of SEQ ID NO: 437-1241, or complementary to any one of SEQ ID NO: 1242-2046.

[0533] In some embodiments, the complex described herein comprises an anti-TfR antibody covalently linked to a molecular payload, wherein the anti-TfR antibody comprises a heavy chain comprising the amino acid sequence of SEQ ID NO: 100 or SEQ ID NO: 101 and a light chain comprising the amino acid sequence of SEQ ID NO: 90. In some embodiments, the molecular payload is a DMD targeting oligonucleotide (e.g., an oligonucleotide listed in Table 14). In some embodiments, the molecular payload is an oligonucleotide provided by any one of SEQ ID NO: 437-1241, or complementary to any one of SEQ ID NO: 1242-2046.

[0534] In some embodiments, the complex described herein comprises an anti-TfR antibody covalently linked to a molecular payload, wherein the anti-TfR antibody comprises a heavy chain comprising the amino acid sequence of SEQ ID NO: 102 and a light chain comprising the amino acid sequence of SEQ ID NO: 93. In some embodiments, the molecular payload is a DMD targeting oligonucleotide (e.g., an oligonucleotide listed in Table 14). In some embodiments, the molecular payload is an oligonucleotide provided by any one of SEQ ID NO: 437-1241, or complementary to any one of SEQ ID NO: 1242-2046.

[0535] In some embodiments, the complex described herein comprises an anti-TfR antibody covalently linked to a molecular payload, wherein the anti-TfR antibody comprises a heavy chain comprising the amino acid sequence of SEQ ID NO: 102 or SEQ ID NO: 103 and a light chain comprising the amino acid sequence of SEQ ID NO: 95. In some embodiments, the molecular payload is a DMD targeting oligonucleotide (e.g., an oligonucleotide listed in Table 14). In some embodiments, the molecular payload is an oligonucleotide provided by any one of SEQ ID NO: 437-1241, or complementary to any one of SEQ ID NO: 1242-2046.

[0536] In some embodiments, the complex described herein comprises an anti-TfR antibody covalently linked via a lysine to the 5′ end of an oligonucleotide, wherein the anti-TfR antibody comprises a heavy chain comprising the amino acid sequence of SEQ ID NO: 84 and a light chain comprising the amino acid sequence of in SEQ ID NO: 85; wherein the complex has the structure of:

[chemical structure]

wherein n is 3 and m is 4. In some embodiments, the oligonucleotide is a DMD targeting oligonucleotide (e.g., an oligonucleotide listed in Table 14). In some embodiments, the oligonucleotide is an oligonucleotide provided by any one of SEQ ID NO: 437-1241, or complementary to any one of SEQ ID NO: 1242-2046.

[0537] In some embodiments, the complex described herein comprises an anti-TfR antibody covalently linked via a lysine to the 5′ end of an oligonucleotide, wherein the anti-TfR antibody comprises a heavy chain comprising the amino acid sequence of SEQ ID NO: 86 and a light chain comprising the amino acid sequence of in SEQ ID NO: 85; wherein the complex has the structure of:

[chemical structure]

wherein n is 3 and m is 4. In some embodiments, the oligonucleotide is a DMD targeting oligonucleotide (e.g., an oligonucleotide listed in Table 14). In some embodiments, the oligonucleotide is an oligonucleotide provided by any one of SEQ ID NO: 437-1241, or complementary to any one of SEQ ID NO: 1242-2046.

[0538] In some embodiments, the complex described herein comprises an anti-TfR antibody covalently linked via a lysine to the 5′ end of an oligonucleotide, wherein the anti-TfR antibody comprises a heavy chain comprising the amino acid sequence of SEQ ID NO: 87 and a light chain comprising the amino acid sequence of in SEQ ID NO: 85; wherein the complex has the structure of:

[chemical structure]

wherein n is 3 and m is 4. In some embodiments, the oligonucleotide is a DMD targeting oligonucleotide (e.g., an oligonucleotide listed in Table 14). In some embodiments, the oligonucleotide is an oligonucleotide provided by any one of SEQ ID NO: 437-1241, or complementary to any one of SEQ ID NO: 1242-2046.

[0539] In some embodiments, the complex described herein comprises an anti-TfR antibody covalently linked via a lysine to the 5′ end of an oligonucleotide, wherein the anti-TfR antibody comprises a heavy chain comprising the amino acid sequence of SEQ ID NO: 88 and a light chain comprising the amino acid sequence of in SEQ ID NO: 89; wherein the complex has the structure of:

[chemical structure]

wherein n is 3 and m is 4. In some embodiments, the oligonucleotide is a DMD targeting oligonucleotide (e.g., an oligonucleotide listed in Table 14). In some embodiments, the oligonucleotide is an oligonucleotide provided by any one of SEQ ID NO: 437-1241, or complementary to any one of SEQ ID NO: 1242-2046.

[0540] In some embodiments, the complex described herein comprises an anti-TfR antibody covalently linked via a lysine to the 5′ end of an oligonucleotide, wherein the anti-TfR antibody comprises a heavy chain comprising the amino acid sequence of SEQ ID NO: 88 and a light chain comprising the amino acid sequence of in SEQ ID NO: 90; wherein the complex has the structure of:

[chemical structure]

wherein n is 3 and m is 4. In some embodiments, the oligonucleotide is a DMD targeting oligonucleotide (e.g., an oligonucleotide listed in Table 14). In some embodiments, the oligonucleotide is an oligonucleotide provided by any one of SEQ ID NO: 437-1241, or complementary to any one of SEQ ID NO: 1242-2046.

[0541] In some embodiments, the complex described herein comprises an anti-TfR antibody covalently linked via a lysine to the 5′ end of an oligonucleotide, wherein the anti-TfR antibody comprises a heavy chain comprising the amino acid sequence of SEQ ID NO: 91 and a light chain comprising the amino acid sequence of in SEQ ID NO: 89; wherein the complex has the structure of:

[chemical structure]

wherein n is 3 and m is 4. In some embodiments, the oligonucleotide is a DMD targeting oligonucleotide (e.g., an oligonucleotide listed in Table 14). In some embodiments, the oligonucleotide is an oligonucleotide provided by any one of SEQ ID NO: 437-1241, or complementary to any one of SEQ ID NO: 1242-2046.

[0542] In some embodiments, the complex described herein comprises an anti-TfR antibody covalently linked via a lysine to the 5′ end of an oligonucleotide, wherein the anti-TfR antibody comprises a heavy chain comprising the amino acid sequence of SEQ ID NO: 91 and a light chain comprising the amino acid sequence of in SEQ ID NO: 90; wherein the complex has the structure of:

[chemical structure]

wherein n is 3 and m is 4. In some embodiments, the oligonucleotide is a DMD targeting oligonucleotide (e.g., an oligonucleotide listed in Table 14). In some embodiments, the oligonucleotide is an oligonucleotide provided by any one of SEQ ID NO: 437-1241, or complementary to any one of SEQ ID NO: 1242-2046.

[0543] In some embodiments, the complex described herein comprises an anti-TfR antibody covalently linked via a lysine to the 5′ end of an oligonucleotide, wherein the anti-TfR antibody comprises a heavy chain comprising the amino acid sequence of SEQ ID NO: 92 and a light chain comprising the amino acid sequence of in SEQ ID NO: 93; wherein the complex has the structure of:

[chemical structure]

wherein n is 3 and m is 4. In some embodiments, the oligonucleotide is a DMD targeting oligonucleotide (e.g., an oligonucleotide listed in Table 14). In some embodiments, the oligonucleotide is an oligonucleotide provided by any one of SEQ ID NO: 437-1241, or complementary to any one of SEQ ID NO: 1242-2046.

[0544] In some embodiments, the complex described herein comprises an anti-TfR antibody covalently linked via a lysine to the 5′ end of an oligonucleotide, wherein the anti-TfR antibody comprises a heavy chain comprising the amino acid sequence of SEQ ID NO: 94 and a light chain comprising the amino acid sequence of in SEQ ID NO: 95; wherein the complex has the structure of:

[chemical structure]

wherein n is 3 and m is 4. In some embodiments, the oligonucleotide is a DMD targeting oligonucleotide (e.g., an oligonucleotide listed in Table 14). In some embodiments, the oligonucleotide is an oligonucleotide provided by any one of SEQ ID NO: 437-1241, or complementary to any one of SEQ ID NO: 1242-2046.

[0545] In some embodiments, the complex described herein comprises an anti-TfR antibody covalently linked via a lysine to the 5′ end of an oligonucleotide, wherein the anti-TfR antibody comprises a heavy chain comprising the amino acid sequence of SEQ ID NO: 92 and a light chain comprising the amino acid sequence of in SEQ ID NO: 95; wherein the complex has the structure of:

[chemical structure]

wherein n is 3 and m is 4. In some embodiments, the oligonucleotide is a DMD targeting oligonucleotide (e.g., an oligonucleotide listed in Table 14). In some embodiments, the oligonucleotide is an oligonucleotide provided by any one of SEQ ID NO: 437-1241, or complementary to any one of SEQ ID NO: 1242-2046.

[0546] In some embodiments, the complex described herein comprises an anti-TfR Fab covalently linked via a lysine to the 5′ end of an oligonucleotide, wherein the anti-TfR Fab comprises a VH comprising the amino acid sequence of SEQ ID NO: 69 and a VL comprising the amino acid sequence of in SEQ ID NO: 70; wherein the complex has the structure of:

[chemical structure]

wherein n is 3 and m is 4. In some embodiments, the oligonucleotide is a DMD targeting oligonucleotide (e.g., an oligonucleotide listed in Table 14). In some embodiments, the oligonucleotide is an oligonucleotide provided by any one of SEQ ID NO: 437-1241, or complementary to any one of SEQ ID NO: 1242-2046.

[0547] In some embodiments, the complex described herein comprises an anti-TfR Fab covalently linked via a lysine to the 5′ end of an oligonucleotide, wherein the anti-TfR Fab comprises a VH comprising the amino acid sequence of SEQ ID NO: 71 and a VL comprising the amino acid sequence of in SEQ ID NO: 70; wherein the complex has the structure of:

[chemical structure]

wherein n is 3 and m is 4. In some embodiments, the oligonucleotide is a DMD targeting oligonucleotide (e.g., an oligonucleotide listed in Table 14). In some embodiments, the oligonucleotide is an oligonucleotide provided by any one of SEQ ID NO: 437-1241, or complementary to any one of SEQ ID NO: 1242-2046.

[0548] In some embodiments, the complex described herein comprises an anti-TfR Fab covalently linked via a lysine to the 5′ end of an oligonucleotide, wherein the anti-TfR Fab comprises a VH comprising the amino acid sequence of SEQ ID NO: 72 and a VL comprising the amino acid sequence of in SEQ ID NO: 70; wherein the complex has the structure of:

[chemical structure]

wherein n is 3 and m is 4. In some embodiments, the oligonucleotide is a DMD targeting oligonucleotide (e.g., an oligonucleotide listed in Table 14). In some embodiments, the oligonucleotide is an oligonucleotide provided by any one of SEQ ID NO: 437-1241, or complementary to any one of SEQ ID NO: 1242-2046.

[0549] In some embodiments, the complex described herein comprises an anti-TfR Fab covalently linked via a lysine to the 5′ end of an oligonucleotide, wherein the anti-TfR Fab comprises a VH comprising the amino acid sequence of SEQ ID NO: 73 and a VL comprising the amino acid sequence of in SEQ ID NO: 74; wherein the complex has the structure of:

[chemical structure]

wherein n is 3 and m is 4. In some embodiments, the oligonucleotide is a DMD targeting oligonucleotide (e.g., an oligonucleotide listed in Table 14). In some embodiments, the oligonucleotide is an oligonucleotide provided by any one of SEQ ID NO: 437-1241, or complementary to any one of SEQ ID NO: 1242-2046.

[0550] In some embodiments, the complex described herein comprises an anti-TfR Fab covalently linked via a lysine to the 5′ end of an oligonucleotide, wherein the anti-TfR Fab comprises a VH comprising the amino acid sequence of SEQ ID NO: 73 and a VL comprising the amino acid sequence of in SEQ ID NO: 75; wherein the complex has the structure of:

[chemical structure]

wherein n is 3 and m is 4. In some embodiments, the oligonucleotide is a DMD targeting oligonucleotide (e.g., an oligonucleotide listed in Table 14). In some embodiments, the oligonucleotide is an oligonucleotide provided by any one of SEQ ID NO: 437-1241, or complementary to any one of SEQ ID NO: 1242-2046.

[0551] In some embodiments, the complex described herein comprises an anti-TfR Fab covalently linked via a lysine to the 5′ end of an oligonucleotide, wherein the anti-TfR Fab comprises a VH comprising the amino acid sequence of SEQ ID NO: 76 and a VL comprising the amino acid sequence of in SEQ ID NO: 74; wherein the complex has the structure of:

[chemical structure]

wherein n is 3 and m is 4. In some embodiments, the oligonucleotide is a DMD targeting oligonucleotide (e.g., an oligonucleotide listed in Table 14). In some embodiments, the oligonucleotide is an oligonucleotide provided by any one of SEQ ID NO: 437-1241, or complementary to any one of SEQ ID NO: 1242-2046.

[0552] In some embodiments, the complex described herein comprises an anti-TfR Fab covalently linked via a lysine to the 5′ end of an oligonucleotide, wherein the anti-TfR Fab comprises a VH comprising the amino acid sequence of SEQ ID NO: 76 and a VL comprising the amino acid sequence of in SEQ ID NO: 75; wherein the complex has the structure of:

[chemical structure]

wherein n is 3 and m is 4. In some embodiments, the oligonucleotide is a DMD targeting oligonucleotide (e.g., an oligonucleotide listed in Table 14). In some embodiments, the oligonucleotide is an oligonucleotide provided by any one of SEQ ID NO: 437-1241, or complementary to any one of SEQ ID NO: 1242-2046.

[0553] In some embodiments, the complex described herein comprises an anti-TfR Fab covalently linked via a lysine to the 5′ end of an oligonucleotide, wherein the anti-TfR Fab comprises a VH comprising the amino acid sequence of SEQ ID NO: 77 and a VL comprising the amino acid sequence of in SEQ ID NO: 78; wherein the complex has the structure of:

[chemical structure]

wherein n is 3 and m is 4. In some embodiments, the oligonucleotide is a DMD targeting oligonucleotide (e.g., an oligonucleotide listed in Table 14). In some embodiments, the oligonucleotide is an oligonucleotide provided by any one of SEQ ID NO: 437-1241, or complementary to any one of SEQ ID NO: 1242-2046.

[0554] In some embodiments, the complex described herein comprises an anti-TfR Fab covalently linked via a lysine to the 5′ end of an oligonucleotide, wherein the anti-TfR Fab comprises a VH comprising the amino acid sequence of SEQ ID NO: 79 and a VL comprising the amino acid sequence of in SEQ ID NO: 80; wherein the complex has the structure of:

[chemical structure]

wherein n is 3 and m is 4. In some embodiments, the oligonucleotide is a DMD targeting oligonucleotide (e.g., an oligonucleotide listed in Table 14). In some embodiments, the oligonucleotide is an oligonucleotide provided by any one of SEQ ID NO: 437-1241, or complementary to any one of SEQ ID NO: 1242-2046.

[0555] In some embodiments, the complex described herein comprises an anti-TfR Fab covalently linked via a lysine to the 5′ end of an oligonucleotide, wherein the anti-TfR Fab comprises a VH comprising the amino acid sequence of SEQ ID NO: 77 and a VL comprising the amino acid sequence of in SEQ ID NO: 80; wherein the complex has the structure of:

[chemical structure]

wherein n is 3 and m is 4. In some embodiments, the oligonucleotide is a DMD targeting oligonucleotide (e.g., an oligonucleotide listed in Table 14). In some embodiments, the oligonucleotide is an oligonucleotide provided by any one of SEQ ID NO: 437-1241, or complementary to any one of SEQ ID NO: 1242-2046.

[0556] In some embodiments, the complex described herein comprises an anti-TfR Fab covalently linked via a lysine to the 5′ end of an oligonucleotide, wherein the anti-TfR Fab comprises a heavy chain comprising the amino acid sequence of SEQ ID NO: 97 and a light chain comprising the amino acid sequence of in SEQ ID NO: 85; wherein the complex has the structure of:

[chemical structure]

wherein n is 3 and m is 4. In some embodiments, the oligonucleotide is a DMD targeting oligonucleotide (e.g., an oligonucleotide listed in Table 14). In some embodiments, the oligonucleotide is an oligonucleotide provided by any one of SEQ ID NO: 437-1241, or complementary to any one of SEQ ID NO: 1242-2046.

[0557] In some embodiments, the complex described herein comprises an anti-TfR Fab covalently linked via a lysine to the 5′ end of an oligonucleotide, wherein the anti-TfR Fab comprises a heavy chain comprising the amino acid sequence of SEQ ID NO: 98 and a light chain comprising the amino acid sequence of in SEQ ID NO: 85; wherein the complex has the structure of:

[chemical structure]

wherein n is 3 and m is 4. In some embodiments, the oligonucleotide is a DMD targeting oligonucleotide (e.g., an oligonucleotide listed in Table 14). In some embodiments, the oligonucleotide is an oligonucleotide provided by any one of SEQ ID NO: 437-1241, or complementary to any one of SEQ ID NO: 1242-2046.

[0558] In some embodiments, the complex described herein comprises an anti-TfR Fab covalently linked via a lysine to the 5′ end of an oligonucleotide, wherein the anti-TfR Fab comprises a heavy chain comprising the amino acid sequence of SEQ ID NO: 99 and a light chain comprising the amino acid sequence of in SEQ ID NO: 85; wherein the complex has the structure of:

[chemical structure]

wherein n is 3 and m is 4. In some embodiments, the oligonucleotide is a DMD targeting oligonucleotide (e.g., an oligonucleotide listed in Table 14). In some embodiments, the oligonucleotide is an oligonucleotide provided by any one of SEQ ID NO: 437-1241, or complementary to any one of SEQ ID NO: 1242-2046.

[0559] In some embodiments, the complex described herein comprises an anti-TfR Fab covalently linked via a lysine to the 5′ end of an oligonucleotide, wherein the anti-TfR Fab comprises a heavy chain comprising the amino acid sequence of SEQ ID NO: 100 and a light chain comprising the amino acid sequence of in SEQ ID NO: 89; wherein the complex has the structure of:

[chemical structure]

wherein n is 3 and m is 4. In some embodiments, the oligonucleotide is a DMD targeting oligonucleotide (e.g., an oligonucleotide listed in Table 14). In some embodiments, the oligonucleotide is an oligonucleotide provided by any one of SEQ ID NO: 437-1241, or complementary to any one of SEQ ID NO: 1242-2046.

[0560] In some embodiments, the complex described herein comprises an anti-TfR Fab covalently linked via a lysine to the 5′ end of an oligonucleotide, wherein the anti-TfR Fab comprises a heavy chain comprising the amino acid sequence of SEQ ID NO: 100 and a light chain comprising the amino acid sequence of in SEQ ID NO: 90; wherein the complex has the structure of:

[chemical structure]

wherein n is 3 and m is 4. In some embodiments, the oligonucleotide is a DMD targeting oligonucleotide (e.g., an oligonucleotide listed in Table 14). In some embodiments, the oligonucleotide is an oligonucleotide provided by any one of SEQ ID NO: 437-1241, or complementary to any one of SEQ ID NO: 1242-2046.

[0561] In some embodiments, the complex described herein comprises an anti-TfR Fab covalently linked via a lysine to the 5′ end of an oligonucleotide, wherein the anti-TfR Fab comprises a heavy chain comprising the amino acid sequence of SEQ ID NO: 101 and a light chain comprising the amino acid sequence of in SEQ ID NO: 89; wherein the complex has the structure of:

[chemical structure]

wherein n is 3 and m is 4. In some embodiments, the oligonucleotide is a DMD targeting oligonucleotide (e.g., an oligonucleotide listed in Table 14). In some embodiments, the oligonucleotide is an oligonucleotide provided by any one of SEQ ID NO: 437-1241, or complementary to any one of SEQ ID NO: 1242-2046.

[0562] In some embodiments, the complex described herein comprises an anti-TfR Fab covalently linked via a lysine to the 5′ end of an oligonucleotide, wherein the anti-TfR Fab comprises a heavy chain comprising the amino acid sequence of SEQ ID NO: 101 and a light chain comprising the amino acid sequence of in SEQ ID NO: 90; wherein the complex has the structure of:

[chemical structure]

wherein n is 3 and m is 4. In some embodiments, the oligonucleotide is a DMD targeting oligonucleotide (e.g., an oligonucleotide listed in Table 14). In some embodiments, the oligonucleotide is an oligonucleotide provided by any one of SEQ ID NO: 437-1241, or complementary to any one of SEQ ID NO: 1242-2046.

[0563] In some embodiments, the complex described herein comprises an anti-TfR Fab covalently linked via a lysine to the 5′ end of an oligonucleotide, wherein the anti-TfR Fab comprises a heavy chain comprising the amino acid sequence of SEQ ID NO: 102 and a light chain comprising the amino acid sequence of in SEQ ID NO: 93; wherein the complex has the structure of:

[chemical structure]

wherein n is 3 and m is 4. In some embodiments, the oligonucleotide is a DMD targeting oligonucleotide (e.g., an oligonucleotide listed in Table 14). In some embodiments, the oligonucleotide is an oligonucleotide provided by any one of SEQ ID NO: 437-1241, or complementary to any one of SEQ ID NO: 1242-2046.

[0564] In some embodiments, the complex described herein comprises an anti-TfR Fab covalently linked via a lysine to the 5′ end of an oligonucleotide, wherein the anti-TfR Fab comprises a heavy chain comprising the amino acid sequence of SEQ ID NO: 103 and a light chain comprising the amino acid sequence of in SEQ ID NO: 95; wherein the complex has the structure of:

[chemical structure]

wherein n is 3 and m is 4. In some embodiments, the oligonucleotide is a DMD targeting oligonucleotide (e.g., an oligonucleotide listed in Table 14). In some embodiments, the oligonucleotide is an oligonucleotide provided by any one of SEQ ID NO: 437-1241, or complementary to any one of SEQ ID NO: 1242-2046.

[0565] In some embodiments, the complex described herein comprises an anti-TfR Fab covalently linked via a lysine to the 5′ end of an oligonucleotide, wherein the anti-TfR Fab comprises a heavy chain comprising the amino acid sequence of SEQ ID NO: 102 and a light chain comprising the amino acid sequence of in SEQ ID NO: 95; wherein the complex has the structure of:

[chemical structure]

wherein n is 3 and m is 4. In some embodiments, the oligonucleotide is a DMD targeting oligonucleotide (e.g., an oligonucleotide listed in Table 14). In some embodiments, the oligonucleotide is an oligonucleotide provided by any one of SEQ ID NO: 437-1241, or complementary to any one of SEQ ID NO: 1242-2046.

[0566] In some embodiments, in any one of the examples of complexes described herein, L1 is any one of the spacers described herein.

[0567] In some embodiments, L1 is:

[chemical structure]

wherein the piperazine moiety links to the oligonucleotide, wherein L2 is

[chemical structure]

wherein the piperazine moiety links to the oligonucleotide.

[chemical structure]

[0568] In some embodiments, L1 is

[chemical structure]

[0569] In some embodiments, L1 is linked to a 5′ phosphate of the oligonucleotide.

[0570] In some embodiments, L1 is optional (e.g., need not be present).

[0571] III. Formulations

[0572] Complexes provided herein may be formulated in any suitable manner. Generally, complexes provided herein are formulated in a manner suitable for pharmaceutical use. For example, complexes can be delivered to a subject using a formulation that minimizes degradation, facilitates delivery and/or (e.g., and) uptake, or provides another beneficial property to the complexes in the formulation. In some embodiments, provided herein are compositions comprising complexes and pharmaceutically acceptable carriers. Such compositions can be suitably formulated such that when administered to a subject, either into the immediate environment of a target cell or systemically, a sufficient amount of the complexes enter target muscle cells. In some embodiments, complexes are formulated in buffer solutions such as phosphate-buffered saline solutions, liposomes, micellar structures, and capsids.

[0573] It should be appreciated that, in some embodiments, compositions may include separately one or more components of complexes provided herein (e.g., muscle-targeting agents, linkers, molecular payloads, or precursor molecules of any one of them).

[0574] In some embodiments, complexes are formulated in water or in an aqueous solution (e.g., water with pH adjustments). In some embodiments, complexes are formulated in basic buffered aqueous solutions (e.g., PBS). In some embodiments, formulations as disclosed herein comprise an excipient. In some embodiments, an excipient confers to a composition improved stability, improved absorption, improved solubility and/or (e.g., and) therapeutic enhancement of the active ingredient. In some embodiments, an excipient is a buffering agent (e.g., sodium citrate, sodium phosphate, a tris base, or sodium hydroxide) or a vehicle (e.g., a buffered solution, petrolatum, dimethyl sulfoxide, or mineral oil).

[0575] In some embodiments, a complex or component thereof (e.g., oligonucleotide or antibody) is lyophilized for extending its shelf-life and then made into a solution before use (e.g., administration to a subject). Accordingly, an excipient in a composition comprising a complex, or component thereof, described herein may be a lyoprotectant (e.g., mannitol, lactose, polyethylene glycol, or polyvinyl pyrolidone), or a collapse temperature modifier (e.g., dextran, ficoll, or gelatin).

[0576] In some embodiments, a pharmaceutical composition is formulated to be compatible with its intended route of administration. Examples of routes of administration include parenteral, e.g., intravenous, intradermal, subcutaneous, administration. Typically, the route of administration is intravenous or subcutaneous.

[0577] Pharmaceutical compositions suitable for injectable use include sterile aqueous solutions (where water soluble) or dispersions and sterile powders for the extemporaneous preparation of sterile injectable solutions or dispersions. The carrier can be a solvent or dispersion medium containing, for example, water, ethanol, polyol (for example, glycerol, propylene glycol, and liquid polyethylene glycol, and the like), and suitable mixtures thereof. In some embodiments, formulations include isotonic agents, for example, sugars, polyalcohols such as mannitol, sorbitol, and sodium chloride in the composition. Sterile injectable solutions can be prepared by incorporating the complexes in a required amount in a selected solvent with one or a combination of ingredients enumerated above, as required, followed by filtered sterilization.

[0578] In some embodiments, a composition may contain at least about 0.1% of the a complex, or component thereof, or more, although the percentage of the active ingredient(s) may be between about 1% and about 80% or more of the weight or volume of the total composition. Factors such as solubility, bioavailability, biological half-life, route of administration, product shelf life, as well as other pharmacological considerations will be contemplated by one skilled in the art of preparing such pharmaceutical formulations, and as such, a variety of dosages and treatment regimens may be desirable.

[0579] IV. Methods of Use/Treatment

[0580] Complexes comprising a muscle-targeting agent covalently linked to a molecular payload as described herein are effective in treating a subject having a dystrophinopathy, e.g., Duchenne muscular dystrophy. In some embodiments, complexes comprise a molecular payload that is an oligonucleotide, e.g., an antisense oligonucleotide that facilitates exon skipping of an mRNA expressed from a mutated DMD allele.

[0581] In some embodiments, a subject may be a human subject, a non-human primate subject, a rodent subject, or any suitable mammalian subject. In some embodiments, a subject may have Duchenne muscular dystrophy or other dystrophinopathy. In some embodiments, a subject has a mutated DMD allele, which may optionally comprise at least one mutation in a DMD exon that causes a frameshift mutation and leads to improper RNA splicing/processing. In some embodiments, a subject is suffering from symptoms of a severe dystrophinopathy, e.g. muscle atrophy or muscle loss. In some embodiments, a subject has an asymptomatic increase in serum concentration of creatine phosphokinase (CK) and/or (e.g., and) muscle cramps with myoglobinuria. In some embodiments, a subject has a progressive muscle disease, such as Duchenne or Becker muscular dystrophy or DMD-associated dilated cardiomyopathy (DCM). In some embodiments, a subject is not suffering from symptoms of a dystrophinopathy.

[0582] An aspect of the disclosure includes a methods involving administering to a subject an effective amount of a complex as described herein. In some embodiments, an effective amount of a pharmaceutical composition that comprises a complex comprising a muscle-targeting agent covalently linked to a molecular payload can be administered to a subject in need of treatment. In some embodiments, a pharmaceutical composition comprising a complex as described herein may be administered by a suitable route, which may include intravenous administration, e.g., as a bolus or by continuous infusion over a period of time. In some embodiments, intravenous administration may be performed by intramuscular, intraperitoneal, intracerebrospinal, subcutaneous, intra-articular, intrasynovial, or intrathecal routes. In some embodiments, a pharmaceutical composition may be in solid form, aqueous form, or a liquid form. In some embodiments, an aqueous or liquid form may be nebulized or lyophilized. In some embodiments, a nebulized or lyophilized form may be reconstituted with an aqueous or liquid solution.

[0583] Compositions for intravenous administration may contain various carriers such as vegetable oils, dimethylactamide, dimethyformamide, ethyl lactate, ethyl carbonate, isopropyl myristate, ethanol, and polyols (glycerol, propylene glycol, liquid polyethylene glycol, and the like). For intravenous injection, water soluble antibodies can be administered by the drip method, whereby a pharmaceutical formulation containing the antibody and a physiologically acceptable excipients is infused. Physiologically acceptable excipients may include, for example, 5% dextrose, 0.9% saline, Ringer's solution or other suitable excipients. Intramuscular preparations, e.g., a sterile formulation of a suitable soluble salt form of the antibody, can be dissolved and administered in a pharmaceutical excipient such as Water-for-Injection, 0.9% saline, or 5% glucose solution.

[0584] In some embodiments, a pharmaceutical composition that comprises a complex comprising a muscle-targeting agent covalently linked to a molecular payload is administered via site-specific or local delivery techniques. Examples of these techniques include implantable depot sources of the complex, local delivery catheters, site specific carriers, direct injection, or direct application.

[0585] In some embodiments, a pharmaceutical composition that comprises a complex comprising a muscle-targeting agent covalently linked to a molecular payload is administered at an effective concentration that confers therapeutic effect on a subject. Effective amounts vary, as recognized by those skilled in the art, depending on the severity of the disease, unique characteristics of the subject being treated, e.g. age, physical conditions, health, or weight, the duration of the treatment, the nature of any concurrent therapies, the route of administration and related factors. These related factors are known to those in the art and may be addressed with no more than routine experimentation. In some embodiments, an effective concentration is the maximum dose that is considered to be safe for the patient. In some embodiments, an effective concentration will be the lowest possible concentration that provides maximum efficacy.

[0586] Empirical considerations, e.g. the half-life of the complex in a subject, generally will contribute to determination of the concentration of pharmaceutical composition that is used for treatment. The frequency of administration may be empirically determined and adjusted to maximize the efficacy of the treatment.

[0587] Generally, for administration of any of the complexes described herein, an initial candidate dosage may be about 1 to 100 mg/kg, or more, depending on the factors described above, e.g. safety or efficacy. In some embodiments, a treatment will be administered once. In some embodiments, a treatment will be administered daily, biweekly, weekly, bimonthly, monthly, or at any time interval that provide maximum efficacy while minimizing safety risks to the subject. Generally, the efficacy and the treatment and safety risks may be monitored throughout the course of treatment

[0588] The efficacy of treatment may be assessed using any suitable methods. In some embodiments, the efficacy of treatment may be assessed by evaluation of observation of symptoms associated with a dystrophinopathy, e.g. muscle atrophy or muscle weakness, through measures of a subject's self-reported outcomes, e.g. mobility, self-care, usual activities, pain/discomfort, and anxiety/depression, or by quality-of-life indicators, e.g. lifespan.

[0589] In some embodiments, a pharmaceutical composition that comprises a complex comprising a muscle-targeting agent covalently linked to a molecular payload described herein is administered to a subject at an effective concentration sufficient to modulate activity or expression of a target gene by at least 10%, at least 20%, at least 30%, at least 40%, at least 50%, at least 60%, at least 70%, at least 80%, at least 90% or at least 95% relative to a control, e.g. baseline level of gene expression prior to treatment.

[0590] In some embodiments, a single dose or administration of a pharmaceutical composition that comprises a complex comprising a muscle-targeting agent covalently linked to a molecular payload described herein to a subject is sufficient to inhibit activity or expression of a target gene for at least 1-5, 1-10, 5-15, 10-20, 15-30, 20-40, 25-50, or more days. In some embodiments, a single dose or administration of a pharmaceutical composition that comprises a complex comprising a muscle-targeting agent covalently linked to a molecular payload described herein to a subject is sufficient to inhibit activity or expression of a target gene for at least 1, 2, 3, 4, 5, 6, 7, 8, 9, 10, 11, or 12 weeks. In some embodiments, a single dose or administration of a pharmaceutical composition that comprises a complex comprising a muscle-targeting agent covalently linked to a molecular payload described herein to a subject is sufficient to inhibit activity or expression of a target gene for at least 1, 2, 3, 4, 5, or 6 months.

[0591] In some embodiments, a pharmaceutical composition may comprise more than one complex comprising a muscle-targeting agent covalently linked to a molecular payload. In some embodiments, a pharmaceutical composition may further comprise any other suitable therapeutic agent for treatment of a subject, e.g. a human subject having a dystrophinopathy. In some embodiments, the other therapeutic agents may enhance or supplement the effectiveness of the complexes described herein. In some embodiments, the other therapeutic agents may function to treat a different symptom or disease than the complexes described herein.

### EXAMPLES

### Example 1: Targeting HPRT with Transfected Antisense Oligonucleotides

[0592] A siRNA that targets hypoxanthine phosphoribosyltransferase (HPRT) was tested in vitro for its ability to reduce expression levels of HPRT in an immortalized cell line. Briefly, Hepa 1-6 cells were transfected with either a control siRNA (siCTRL; 100 nM) or the siRNA that targets HPRT (siHPRT; 100 nM), formulated with lipofectamine 2000. HPRT expression levels were evaluated 48 hours following transfection. A control experiment was also performed in which vehicle (phosphate-buffered saline) was delivered to Hepa 1-6 cells in culture and the cells were maintained for 48 hours. As shown in FIG. 1, it was found that the HPRT siRNA reduced HPRT expression levels by about 90% compared with controls. Sequences of the siRNAs used are provided in Table 6.

TABLE 6
Sequences of siHPRT and siCTRL

| | Sequence* | SEQ ID NO: |
|---|---|---|
| siHPRT sense strand | 5′-UcCuAuGaCuGuAgAuUuUaU-(CH2)6NH2-3′ | 147 |
| siHPRT antisense strand | 5′-paUaAaAuCuAcAgUcAuAgGasAsu-3′ | 148 |
| siCTRL sense strand | 5′-UgUaAuAaCcAuAuCuAcCuU-(CH2)6NH2-3′ | 149 |
| siCTRL antisense strand | 5′-aAgGuAgAuAuGgUuAuUaCasAsa-3′ | 150 |

*Lower case - 2′Ome ribose; Capital letter - 2′Fluoro ribose; p - phosphate linkage; s - phosphorothioate linkage

### Example 2: Targeting HPRT with a Muscle-Targeting Complex

[0593] A muscle-targeting complex was generated comprising the HPRT siRNA used in Example 1 (siHPRT) covalently linked, via a non-cleavable N-gamma-maleimidobutyryl-oxysuccinimide ester (GMBS) linker, to RI7 217 anti-TfR1 Fab (DTX-A-002), an anti-transferrin receptor antibody.

[0594] Briefly, the GMBS linker was dissolved in dry DMSO and coupled to the 3′ end of the sense strand of siHPRT through amide bond formation under aqueous conditions. Completion of the reaction was verified by Kaiser test. Excess linker and organic solvents were removed by gel permeation chromatography. The purified, maleimide functionalized sense strand of siHPRT was then coupled to DTX-A-002 antibody using a Michael addition reaction.

[0595] The product of the antibody coupling reaction was then subjected to size exclusion chromatograpy (SEC) purification. antiTfR-siHPRT complexes comprising one or two siHPRT molecules covalently attached to DTX-A-002 antibody were purified. Densitometry confirmed that the purified sample of complexes had an average siHPRT to antibody ratio of 1.46. SDS-PAGE analysis demonstrated that >90% of the purified sample of complexes comprised DTX-A-002 linked to either one or two siHPRT molecules.

[0596] Using the same methods as described above, a control IgG2a-siHPRT complex was generated comprising the HPRT siRNA used in Example 1 (siHPRT) covalently linked via the GMBS linker to an IgG2a (Fab) antibody (DTX-A-003). Densitometry confirmed that DTX-C-001 (the IgG2a-siHPRT complex) had an average siHPRT to antibody ratio of 1.46 and SDS-PAGE demonstrated that >90% of the purified sample of control complexes comprised DTX-A-003 linked to either one or two siHPRT molecules.

[0597] The antiTfR-siHPRT complex was then tested for cellular internalization and inhibition of HPRT in cellulo. Hepa 1-6 cells, which have relatively high expression levels of transferrin receptor, were incubated in the presence of vehicle (phosphate-buffered saline), IgG2a-siHPRT (100 nM), antiTfR-siCTRL (100 nM), or antiTfR-siHPRT (100 nM), for 72 hours. After the 72 hour incubation, the cells were isolated and assayed for expression levels of HPRT (FIG. 2). Cells treated with the antiTfR-siHPRT demonstrated a reduction in HPRT expression by about 50% relative to the cells treated with the vehicle control and to those treated with the IgG2a-siHPRT complex. Meanwhile, cells treated with either of the IgG2a-siHPRT or antiTfR-siCTRL had HPRT expression levels comparable to the vehicle control (no reduction in HPRT expression). These data indicate that the anti-transferrin receptor antibody of the antiTfR-siHPRT enabled cellular internalization of the complex, thereby allowing the siHPRT to inhibit expression of HPRT.

### Example 3: Targeting HPRT in Mouse Muscle Tissues with a Muscle-Targeting Complex

[0598] The muscle-targeting complex described in Example 2, antiTfR-siHPRT, was tested for inhibition of HPRT in mouse tissues. C57BL/6 wild-type mice were intravenously injected with a single dose of a vehicle control (phosphate-buffered saline); siHPRT (2 mg/kg of siRNA); IgG2a-siHPRT (2 mg/kg of siRNA, corresponding to 9 mg/kg antibody complex); or antiTfR-siHPRT (2 mg/kg of siRNA, corresponding to 9 mg/kg antibody complex. Each experimental condition was replicated in four individual C57BL/6 wild-type mice. Following a three-day period after injection, the mice were euthanized and segmented into isolated tissue types. Individual tissue samples were subsequently assayed for expression levels of HPRT (FIGS. 3A-3B and 4A-4E).

[0599] Mice treated with the antiTfR-siHPRT complex demonstrated a reduction in HPRT expression in gastrocnemius (31% reduction; p<0.05) and heart (30% reduction; p<0.05), relative to the mice treated with the siHPRT control (FIGS. 3A-3B). Meanwhile, mice treated with the IgG2a-siHPRT complex had HPRT expression levels comparable to the siHPRT control (little or no reduction in HPRT expression) for all assayed muscle tissue types.

[0600] Mice treated with the antiTfR-siHPRT complex demonstrated no change in HPRT expression in non-muscle tissues such as brain, liver, lung, kidney, and spleen tissues (FIGS. 4A-4E). These data indicate that the anti-transferrin receptor antibody of the antiTfR-siHPRT complex enabled cellular internalization of the complex into muscle-specific tissues in an in vivo mouse model, thereby allowing the siHPRT to inhibit expression of HPRT. These data further demonstrate that the antiTfR-oligonucleotide complexes of the current disclosure are capable of specifically targeting muscle tissues.

### Example 4: Targeting DMD with a Muscle-Targeting Complex

[0601] A muscle-targeting complex is generated comprising an antisense oligonucleotide that targets a mutant allele of DMD (DMD ASO), for exon skipping, e.g., an oligonucleotide having a sequence as disclosed in Table 14, covalently linked, via a cathepsin cleavable linker, to DTX-A-002 (RI7 217 (Fab)), an anti-transferrin receptor antibody.

[0602] Briefly, purified Val-Cit-linker-DMD ASO is coupled to a functionalized antibody fragment (e.g, RI7 217 (Fab) or 15G11 (Fab)) generated through modifying F-amine on lysine of the antibody.

[0603] The product of the antibody coupling reaction is then subjected to hydrophobic interaction chromatography (HIC-HPLC) to purify the muscle-targeting complex. Densitometry and SDS-PAGE analysis of the purified complex allow for determination of the average ratio of ASO-to-antibody and total purity, respectively.

[0604] Using the same methods as described above, a control complex is generated comprising DMD ASO covalently linked via a Val-Cit linker to an IgG2a (Fab) antibody. The purified muscle-targeting complex comprising DTX-A-002 covalently linked to DMD ASO is then tested for cellular internalization and modulation of DMD exon skipping. Disease-relevant muscle cells that have relatively high expression levels of transferrin receptor, are incubated in the presence of vehicle control (saline), muscle-targeting complex (100 nM), or control complex (100 nM) for 72 hours. After the 72 hour incubation, the cells are isolated and assayed for expression levels of DMD.

### Example 5: Targeting DMD with a Muscle-Targeting Complex

[0605] A muscle-targeting complex (DTX-C-042) was generated comprising an PMO ASO that targets exon 23 of DMD covalently linked to DTX-A-002 (RI7 217 (Fab)), an anti-transferrin receptor antibody.

[0606] Briefly, a Bicyclo[6.1.0]nonyne-PEG3-L-valine-L-citrulline-pentafluorophenyl ester (BCN-PEG3-Val-Cit-PFP) linker molecule was coupled to NH2-C6-(exon-23 PMO) using an amide coupling reaction. Excess linker and organic solvents were removed by gel permeation chromatography. The purified Val-Cit-linker-(exon-23 PMO) was then coupled to an azide functionalized anti-transferrin receptor antibody (DTX-A-002) generated through modifying F-amine on lysine with Azide-PEG4-PFP.

[0607] The product of the antibody coupling reaction was then purified and densitometry confirmed that this sample of DTX-C-042 complexes had an average ASO to antibody ratio of 1.9.

[0608] The PMO ASO that targets exon 23 of DMD used in this Example comprises a sequence consisting of GGCCAAACCUCGGCUUACCUGAAAU (SEQ ID NO: 171).

[0609] DTX-C-042 was tested for its ability to induce exon skipping of exon 23 of the dystrophin gene, and to subsequently increase expression of dystrophin protein in targeted muscles relevant to DMD in vivo. mdx mice, a DMD mouse model, were intravenously injected with a single dose of a vehicle control (saline); DTX-C-042 complex at a dose of 10 mg/kg ASO; DTX-C-042 complex at a dose of 20 mg/kg ASO; or DTX-C-042 complex at a dose of 30 mg/kg ASO. Each experimental condition was replicated in four mdx mice. Four wild-type mice were also dosed with vehicle control (saline) as a control experiment.

[0610] Fourteen days after treatment, mice were euthanized and targeted muscle tissues were collected. Individual muscle tissue samples were subsequently assayed for percent skipping of exon 23 of the dystrophin gene (FIG. 5). Additionally, dystrophin protein levels in targeted muscles were also quantified (quantification of dystrophin in quadriceps is shown in FIGS. 6A-6B).

[0611] Mice treated with the DTX-C-042 complex demonstrated a dose-dependent increase in the percent exon skipping of exon 23 in quadriceps, diaphragm, and heart muscles. Mice treated with the DTX-C-042 complex also demonstrated a dose-dependent increase in the expression of dystrophin protein in the quadriceps, with an average of >4% dystrophin protein in mice treated with 30 mg/kg ASO equivalent of DTX-C-042.

[0612] These data demonstrate that the anti-transferrin receptor antibody of the antibody-ASO complex enables cellular internalization of the complex into muscle-specific tissues in an in vivo mdx mouse model, thereby allowing the exon 23 PMO ASO to induce exon skipping of exon 23 of DMD. These data further demonstrate that the antibody-ASO complex is capable of specifically targeting muscle tissues.

### Example 6: Targeting DMD with a Muscle-Targeting Complex to Demonstrate Functional Benefit in Mdx Mouse Model

[0613] Mdx mice (DMD mouse model; diseased mice) were intravenously injected with a single dose of a vehicle control (saline); the MDX-ASO (naked exon 23 skipping PMO ASO, 30 mg/kg); or the DTX-C-042 complex as described in Example 5 (anti-transferrin receptor antibody RI7 217 Fab linked to exon 23 skipping PMO, 30 mg/kg ASO equivalent). Each experimental condition was replicated in five mdx mice. Five wild-type mice (healthy mice) were also dosed with vehicle control (saline).

[0614] Two and four weeks after injection, the functional activity of all treated mice was determined using an open field chamber experiment. The experiment involved three consecutive stages: (1) a 10-minute period during which each mouse was placed into an open field chamber; (2) a 10-minute period during which each mouse was subjected to a hind limb fatigue challenge; and (3) a 10-minute period during which each mouse was placed into an open field chamber. The total horizontal distances traveled during stages (1) and (3) were collected. The percent change in the total distance traveled between the first and second tests. As shown in FIG. 7A, at the two week timepoint, the wild-type mice treated with saline traveled an average of about 20% less during stage (3) relative to stage (1); the mdx mice treated with saline traveled an average of about 70% less during stage (3) relative to stage (1); the mdx mice treated with MDX-ASO traveled an average of about 85% less during stage (3) relative to stage (1); and the mdx mice treated with DTX-C-042 traveled an average of about 40% less during stage (3) relative to stage (1). When compared to wild-type mice treated with saline, mdx mice treated with saline performed significantly worse (as indicated by a significant decrease in distance traveled in stage (3) relative to stage (1)). This observation is consistent with the impaired motor function experienced by DMD patients. mdx mice treated with naked MDX-ASO showed the same compromised functional performance as those treated with vehicle. In contrast, the performance of mdx mice treated with DTX-C-042 was not statistically different from vehicle treated wild-type mice. As shown in FIG. 7B, at the four week timepoint, the wild-type mice treated with saline traveled an average of about 35% less during stage (3) relative to stage (1); the mdx mice treated with saline traveled an average of about 80% less during stage (3) relative to stage (1); the mdx mice treated with MDX-ASO traveled an average of about 55% less during stage (3) relative to stage (1); and the mdx mice treated with DTX-C-042 traveled an average of about 50% less during stage (3) relative to stage (1).

[0615] Two and four weeks after injection, the activity of all treated mice was determined using a cage running wheel test. Each mouse was individually placed into cages with a running wheel for a 24-hour period. The 24-hour period involved five hours of light on followed by thirteen hours of darkness, and ending with six hours of light. The total distance traveled (in meters, m) by each mouse on the running wheel was continuously collected throughout the 24-hour period and subsequently binned into discrete one-hour increments. As shown in FIG. 7C, at the two week timepoint, the distance traveled by the mdx mice treated with DTX-C-042 was higher than the distance traveled by the mdx mice treated with MDX-ASO or with saline, and approached the distance traveled by the wild-type mice at certain times. As shown in FIG. 7D, at the four week timepoint, the distance traveled by the mdx mice treated with DTX-C-042 complex closely mirrored the total distance traveled by the wild-type mice treated with saline during the dark period (i.e., when mice are active). This is in contrast to the mdx mice treated with either saline or MDX-ASO, which traveled considerably shorter distances during the dark period.

[0616] All mice in this Example were further tested for creatine kinase activity levels two weeks and four weeks after injection. Wild-type mice do not secrete large amounts of creatine kinase from muscle tissues. Conversely, mdx mice (having diseased muscle tissues) do secrete high levels of creatine kinase, which can be observed by determination of creatine kinase enzymatic activities. As shown in FIG. 7E, the mdx mice that were treated with saline had approximately 9- and 10- fold more creatine kinase enzymatic activity relative to wild-type mice treated with saline after two and four weeks, respectively. Dosing with naked ASO provided no significant benefit to the mdx mice. However, dosing mdx mice with DTX-C-042 complex did provide a statistically significant reduction in levels of creatine kinase activity after both two and four weeks.

[0617] These surprising results show that the antibody-ASO complex is capable of providing functional benefits to mice suffering from a DMD phenotype (mdx mice), such that these mice have phenotypic indicators resembling healthy (wild-type) mice. The performance of the antibody-ASO complex relative to the naked PMO (MDX-ASO) demonstrates that the anti-transferrin receptor antibody of the antibody-ASO complex is responsible for providing the functional benefits shown in this Example.

### Example 7: Binding Affinity of Selected Anti-TfR1 Antibodies to Human TfR1

[0618] Selected anti-TfR1 antibodies were tested for their binding affinity to human TfR1 for measurement of Ka (association rate constant), Kd (dissociation rate constant), and K_{D} (affinity). Two known anti-TfR1 antibodies were used as control, 15G11 and OKT9. The binding experiment was performed on Carterra LSA at 25° C. An anti-mouse IgG and anti-human IgG antibody “lawn” was prepared on a HC30M chip by amine coupling. The IgGs were captured on the chip. Dilution series of hTfR1, cyTfR1, and hTfR2 were injected to the chip for binding (starting from 1000 nM, 1:3 dilution, 8 concentrations).

[0619] Binding data were referenced by subtracting the responses from a buffer analyte injection and globally fitting to a 1:1 Langmuir binding model for estimate of Ka (association rate constant), Kd (dissociation rate constant), and K_{D} (affinity) using the Carterra™ Kinetics software. 5-6 concentrations were used for curve fitting.

[0620] The result showed that the mouse mAbs demonstrated binding to hTfR1 with K_{D} values ranging from 13 pM to 50 nM. A majority of the mouse mAbs had K_{D} values in the single digit nanomolar to sub-nanomolar range. The tested mouse mAbs showed cross-reactive binding to cyTfR1 with K_{D} values ranging from 16 pM to 22 nM.

[0621] Ka, Kd, and K_{D} values of anti-TfR1 antibodies are provided in Table 7.

TABLE 7
Ka, Kd, and K_{D} values of anti-TfR1 antibodies

| Name | K_{D} (M) | Ka (M) | Kd (M) |
|---|---|---|---|
| ctrl-15G11 | 2.83E−10 | 3.70E+05 | 1.04E−04 |
| ctrl-OKT9 mIgG | 5.36E−10 | 7.74E+05 | 4.15E−04 |
| 3-A04 | 4.36E−10 | 4.47E+05 | 1.95E−04 |
| 3-M12 | 7.68E−10 | 1.66E+05 | 1.27E−04 |
| 5-H12 | 2.08E−07 | 6.67E+04 | 1.39E−02 |

### Example 8: Conjugation of Anti-TfR1 Antibodies with Oligonucleotides

[0622] Complexes containing an anti-TfR1 antibody covalently conjugated to a tool oligo (ASO300) were generated. First, Fab fragments of anti-TfR antibody clones 3-A4, 3-M12, and 5-H12 were prepared by cutting the mouse monoclonal antibodies with an enzyme in or below the hinge region of the full IgG followed by partial reduction. The Fabs were confirmed to be comparable to mAbs in avidity or affinity.

[0623] Muscle-targeting complexes were generated by covalently linking the anti-TfR mAbs to the ASO300 via a cathepsin cleavable linker. Briefly, a Bicyclo[6.1.0]nonyne-PEG3-L-valine-L-citrulline-pentafluorophenyl ester (BCN-PEG3-Val-Cit-PFP) linker molecule was coupled to the ASO300 through a carbamate bond. Excess linker and organic solvents were removed by tangential flow filtration (TFF). The purified Val-Cit-linker-ASO was then coupled to an azide functionalized anti-transferrin receptor antibody generated through modifying F-amine on lysine with Azide-PEG4-PFP. A positive control muscle-targeting complex was also generated using 15G11.

[0624] The product of the antibody coupling reaction was then subjected to two purification methods to remove free antibody and free payload. Concentrations of the conjugates were determined by either Nanodrop A280 or BCA protein assay (for antibody) and Quant-It Ribogreen assay (for payload). Corresponding drug-antibody ratios (DARs) were calculated. DARs ranged between 0.8 and 2.0, and were standardized so that all samples receive equal amounts of payload.

[0625] The purified complexes were then tested for cellular internalization and inhibition of the target gene, DMPK. Non-human primate (NHP) or DM1 (donated by DM1 patients) cells were grown in 96-well plates and differentiated into myotubes for 7 days. Cells were then treated with escalating concentrations (0.5 nM, 5 nM, 50 nM) of each complex for 72 hours. Cells were harvested, RNA was isolated, and reverse transcription was performed to generate cDNA. qPCR was performed using TaqMan kits specific for Ppib (control) and DMPK on the QuantStudio 7. The relative amounts of remaining DMPK transcript in treated vs non-treated cells were calculated and the results are shown in Table 12.

[0626] The results demonstrated that the anti-TfR1 antibodies are able to target muscle cells, be internalized by the muscle cells with the molecular payload (the tool oligo ASO300), and that the molecular payload is able to target and knockdown the target gene (DMPK). Knockdown activity of a complex comprising the anti-TfR1 antibody conjugated to a molecular payload (e.g., an oligonucleotide) targeting DMD may be tested using the same assay as described herein, e.g., by using any one of the oligonucleotides described in Table 14, provided by any one of SEQ ID NO: 437-1241, or complementary to any one of SEQ ID NO: 1242-2046.

TABLE 12
Binding Affinity of anti-TfR1 Antibodies and Efficacy of Conjugates

| | | | | % knockdown of |
|---|---|---|---|---|
| | | | % knockdown of | DMPK in cells |
| | | | DMPK in NHP | from human DM1 |
| | huTfR1 | cyTfR1 | cells using | patients using |
| | Avg K_{D} (M) | Avg K_{D} (M) | Antibody-DMPK | Antibody-DMPK |
| Clone Name | (antibody alone) | (antibody alone) | ASO conjugate | ASO conjugate |
| 15G11 (control) | 8.0E−10 | 1.0E−09 | 36 | 46 |
| 3-A4 | 4.36E−10 | 2.32E−09 | 77 | 70 |
| 3-M12 | 7.68E−10 | 5.18E−09 | 77 | 52 |
| 5-H12 | 2.02316E−07 | 1.20E−08 | 88 | 57 |

[0627] Interestingly, the DMPK knockdown results showed a lack of correlation between the binding affinity of the anti-TfR to transferrin receptor and efficacy in delivering a DMPK ASO to cells for DMPK knockdown. Surprisingly, the anti-TfR antibodies provided herein (e.g., at least 3-A4, 3-M12, and 5-H12) demonstrated superior activity in delivering a payload (e.g., DMPK ASO) to the target cells and achieving the biological effect of the molecular payload (e.g., DMPK knockdown) in either cyno cells or human DM1 patient cells, compared to the control antibody 15G11, despite the comparable binding affinity (or, in certain instances, such as 5-H12, lower binding affinity) to human or cyno transferrin receptor between these antibodies and the control antibody 15G11.

[0628] Top attributes such as high huTfR1 affinity, >50% knockdown of DMPK in NHP and DM1 patient cell line, identified epitope binding with 3 unique sequences, low/no predicted PTM sites, and good expression and conjugation efficiency led to the selection of the top 3 clones for humanization, 3-A4, 3-M12, and 5-H12.

### Example 9: Humanized Anti-TfR1 Antibodies

[0629] The anti-TfR antibodies shown in Table 2 were subjected to humanization and mutagenesis to reduce manufacturability liabilities. The humanized variants were screened and tested for their binding properties and biological actives. Humanized variants of anti-TfR1 heavy and light chain variable regions (5 variants each) were designed using Composite Human Technology. Genes encoding Fabs having these heavy and light chain variable regions were synthesized, and vectors were constructed to express each humanized heavy and light chain variant. Subsequently, each vector was expressed on a small scale and the resultant humanized anti-TfR1 Fabs were analyzed. Humanized Fabs were selected for further testing based upon several criteria including Biocore assays of antibody affinity for the target antigen, relative expression, percent homology to human germline sequence, and the number of MHC class II predicted T cell epitopes (determined using iTope™ MCH class II in silico analysis).

[0630] Potential liabilities were identified within the parental sequence of some antibodies by introducing amino acid substitutions in the heavy chain and light chain variable regions. These substitutions were chosen based on relative expression levels, iTope™ score and relative K_{D} from Biacore single cycle kinetics analysis. The humanized variants were tested and variants were selected initially based upon affinity for the target antigen. Subsequently, the selected humanized Fabs were further screened based on a series of biophysical assessments of stability and susceptibility to aggregation and degradation of each analyzed variant, shown in Table 16 and Table 17. The selected Fabs were analyzed for their properties binding to TfR1 by kinetic analysis. The results of these analyses are shown in Table 13. For conjugates shown in Table 16 and Table 17, the selected humanized Fabs were conjugated to a DMPK-targeting oligonucleotide ASO300. The selected Fabs are thermally stable, as indicated by the comparable binding affinity to human and cyno TfR1 after been exposed to high temperature (40° C.) for 9 days, compared to before the exposure (see Table 13).

TABLE 16
Biophysical assessment data for humanized anti-TfR Fabs

| | Variant | | | | |
|---|---|---|---|---|---|
| | 3M12 | 3M12 | 3M12 | 3M12 | 3A4 (VH3- |
| Criteria | (VH3/Vk2) | (VH3/Vk3) | (VH4/Vk2) | (VH4/Vk3) | N54T/Vk4) |
| Binding Affinity | 395 pM | 345 pM | 396 pM | 341 pM | 3.09 nM |
| (Biacore d0) | | | | | |
| Binding Affinity | 567 pM | 515 pM | 510 pM | 486 pM | 3.01 nM |
| (Biacore d25) | | | | | |
| Fab binding affinity | 0.8 nM/ | 0.6 nM/ | 0.4 nM/ | 0.5 nM/ | 2.6 nM/ |
| ELISA (human/cyno | 9.9 nM | 4.7 nM | 1.4 nM | 2.2 nM | 156 nM* |
| TfR1) | | | | | |
| Conjugate binding | 2.2 nM/ | N/A | N/A | 1.7 nM/ | 2.8 nM/ |
| affinity ELISA | 2.9 nM | | | 2.1 nM | 4.7 nM |
| (human/cyno TfR1) | | | | | |

. . .

| | Variant | | | | | | | |
|---|---|---|---|---|---|---|---|---|
| | 3A4 (VH3- | 3A4 | 5H12 (VH5- | | 5H12 (VH5- | | 5H12 (VH4- | |
| Criteria | N54S/Vk4) | (VH3/Vk4) | C33Y/Vk3) | | C33D/Vk4) | | C33Y/Vk4) | |
| Binding Affinity | 1.34 nM | 1.5 nM | 627 | pM | 991 | pM | 626 | pM |
| (Biacore d0) | | | | | | | | |
| Binding Affinity | 1.39 nM | 1.35 nM | 1.07 | nM | 3.01 | nM | 1.33 | nM |
| (Biacore d25) | | | | | | | | |
| Fab binding affinity | 1.6 nM/ | 1.5 nM/ | 6.3 nM/ | | 6.0 nM/ | | 2.8 nM/ | |
| ELISA (human/cyno | 398 nM* | 122 nM* | 2.1 nM | | 3.5 nM | | 3.3 nM | |
| TfR1) | | | | | | | | |
| Conjugate binding | 2.9 nM/ | 2.8 nM/ | 33.4 nM/ | | 110 nM/ | | 23.7 nM/ | |
| affinity ELISA | 7.8 nM | 7.6 nM | 2.3 nM | | 10.2 nM | | 3.3 nM | |
| (human/cyno TfR1) | | | | | | | | |

*Regains cyno binding after conjugation;

TABLE 17
Thermal Stability for humanized anti-TfR Fabs and conjugates

| | Variant | | | | |
|---|---|---|---|---|---|
| | 3M12 | 3M12 | 3M12 | 3M12 | 3A4 (VH3- |
| Criteria | (VH3/Vk2) | (VH3/Vk3) | (VH4/Vk2) | (VH4/Vk3) | N54T/Vk4) |
| Binding affinity hTfR1 | 0.8 | 0.6 | 0.4 | 0.5 | 2.6 |
| d0 (nM) | | | | | |
| Binding affinity hTfR1 | 0.98 | 1.49 | 0.50 | 0.28 | 0.40 |
| d9 (nM) | | | | | |
| Binding affinity cyno | 9.9 | 4.7 | 1.4 | 2.2 | 156 |
| TfR1 d0 (nM) | | | | | |
| Binding affinity cyno | 19.51 | 15.58 | 5.01 | 16.40 | 127.50 |
| TfR1 d9 (nM) | | | | | |
| DMPK oligo conjugate | 1.14 | N/A | N/A | 1.18 | 2.22 |
| binding to hTfR1 (nM) | | | | | |
| DMPK oligo conjugate | 2.26 | N/A | N/A | 1.85 | 5.12 |
| binding to cyno TfR1 | | | | | |
| (nM) | | | | | |

. . .

| | Variant | | | | |
|---|---|---|---|---|---|
| | 3A4 (VH3- | 3A4 | 5H12 (VH5- | 5H12 (VH5- | 5H12 (VH4- |
| Criteria | N54S/Vk4) | (VH3/Vk4) | C33Y/Vk3) | C33D/Vk4) | C33Y/Vk4) |
| Binding affinity hTfR1 | 1.6 | 1.5 | 6.3 | 6 | 2.8 |
| d0 (nM) | | | | | |
| Binding affinity hTfR1 | 0.65 | 0.46 | 71.90 | 92.34 | 1731.00 |
| d9 (nM) | | | | | |
| Binding affinity cyno | 398 | 122 | 2.1 | 3.5 | 3.3 |
| TfR1 d0 (nM) | | | | | |
| Binding affinity cyno | 248.30 | 878.40 | 0.69 | 0.63 | 0.26 |
| TfR1 d9 (nM) | | | | | |
| DMPK oligo conjugate | 2.71 | 2.837 | N/A | 110.5 | 13.9 |
| binding to hTfR1 (nM) | | | | | |
| DMPK oligo conjugate | 4.1 | 7.594 | N/A | 10.18 | 13.9 |
| binding to cyno TfR1 | | | | | |
| (nM) | | | | | |

TABLE 13
Kinetic analysis of humanized anti-TfR Fabs binding to TfR1

| Humanized anti-TfR Fabs | kₐ (1/Ms) | k_{d} (1/s) | K_{D} (M) | R_{MAX} | Chi² (RU²) |
|---|---|---|---|---|---|
| 3A4 (VH3/Vk4) | 7.65E+10 | 1.15E+02 | 1.50E−09 | 48.0 | 0.776 |
| 3A4 (VH3-N54S/Vk4) | 4.90E+10 | 6.56E+01 | 1.34E−09 | 49.4 | 0.622 |
| 3A4 (VH3-N54T/Vk4) | 2.28E+05 | 7.05E−04 | 3.09E−09 | 61.1 | 1.650 |
| 3M12 (VH3/Vk2) | 2.64E+05 | 1.04E−04 | 3.95E−10 | 78.4 | 0.037 |
| 3M12 (VH3/Vk3) | 2.42E+05 | 8.34E−05 | 3.45E−10 | 91.1 | 0.025 |
| 3M12 (VH4/Vk2) | 2.52E+05 | 9.98E−05 | 3.96E−10 | 74.8 | 0.024 |
| 3M12 (VH4/Vk3) | 2.52E+05 | 8.61E−05 | 3.41E−10 | 82.4 | 0.030 |
| 5H12 (VH5-C33D/Vk4) | 6.78E+05 | 6.72E−04 | 9.91E−10 | 49.3 | 0.093 |
| 5H12 (VH5-C33Y/Vk3) | 1.95E+05 | 1.22E−04 | 6.27E−10 | 68.5 | 0.021 |
| 5H12 (VH5-C33Y/Vk4) | 1.86E+05 | 1.17E−04 | 6.26E−10 | 75.2 | 0.026 |

[0631] To measure binding of humanized anti-TfR antibodies to TfR1, ELISAs were conducted. High binding, black, flat bottom, 96 well plates (Corning #3925) were first coated with 100 μL/well of recombinant huTfR1 at 1 μg/mL in PBS and incubated at 4° C. overnight. Wells were emptied and residual liquid was removed. Blocking was conducted by adding 200 μL of 1% BSA (w/w) in PBS to each well. Blocking was allowed to proceed for 2 hours at room temperature on a shaker at 300 rpm. After blocking, liquid was removed and wells were washed three times with 300 μL of TBST. Anti-TfR1 antibodies were then added in 0.5% BSA/TBST in triplicate in an 8 point serial dilution (dilution range 5 μg/mL-5 ng/mL). A positive control and isotype controls were also included on the ELISA plate. The plate was incubated at room temperature on an orbital shaker for 60 minutes at 300 rpm, and the plate was washed three times with 300 μL of TBST. Anti-(H+L)IgG-A488 (1:500) (Invitrogen #A11013) was diluted in 0.5% BSA in TBST, and 100 μL was added to each well. The plate was then allowed to incubate at room temperature for 60 minutes at 300 rpm on orbital shaker. The liquid was removed and the plate was washed four times with 300 μL of TBST. Absorbance was then measured at 495 nm excitation and 50 nm emission (with a 15 nm bandwidth) on a plate reader. Data was recorded and analyzed for EC₅₀. The data for binding to human TfR1 (hTfR1) for the humanized 3M12, 3A4 and 5H12 Fabs are shown in FIGS. 9A, 9C, and 9E, respectively. ELISA measurements were conducted using cynomolgus monkey (Macaca fascicularis) TfR1 (cTfR1) according to the same protocol described above for hTfR1, and results are shown in FIGS. 9B, 9D, and 9F.

[0632] Results of these two sets of ELISA analyses for binding of the humanized anti-TfR Fabs to hTfR1 and cTfR1 demonstrate that humanized 3M12 Fabs show consistent binding to both hTfR1 and cTfR1, and that humanized 3A4 Fabs show decreased binding to cTfR1 relative to hTfR1.

[0633] Antibody-oligonucleotide conjugates were prepared using six humanized anti-TfR Fabs, each of which were conjugated to a DMPK targeting oligonucleotide ASO300. Conjugation efficiency and down-stream purification were characterized, and various properties of the product conjugates were measured. The results demonstrate that conjugation efficiency was robust across all 10 variants tested, and that the purification process (hydrophobic interaction chromatography followed by hydroxyapatite resin chromatography) were effective. The purified conjugates showed a >97% purity as analyzed by size exclusion chromatography.

[0634] Several humanized Fabs were tested in cellular uptake experiments to evaluate TfR1-mediated internalization. To measure such cellular uptake mediated by antibodies, humanized anti-TfR Fab conjugates were labeled with Cypher5e, a pH-sensitive dye. Rhabdomyosarcoma (RD) cells were treated for 4 hours with 100 nM of the conjugates, trypsinized, washed twice, and analyzed by flow cytometry. Mean Cypher5e fluorescence (representing uptake) was calculated using Attune NxT software. As shown in FIG. 10, the humanized anti-TfR Fabs show similar or greater endosomal uptake compared to a positive control anti-TfR1 Fab. Similar internalization efficiencies were observed for different oligonucleotide payloads. An anti-mouse TfR antibody was used as the negative control. Cold (non-internalizing) conditions abrogated the fluorescence signal of the positive control antibody-conjugate (data not shown), indicating that the positive signal in the positive control and humanized anti-TfR Fab-conjugates is due to internalization of the Fab-conjugates. Similarly, an oligonucleotide that induces DMD exon skipping can also be conjugated the humanized anti-TfR Fabs for cellular uptake by muscle cells.

[0635] Conjugates of six humanized anti-TfR Fabs of were also tested for binding to hTfR1 and cTfR1 by ELISA, and compared to the unconjugated forms of the humanized Fabs. Results demonstrate that humanized 3M12 and 5H12 Fabs maintain similar levels of hTfR1 and cTfR1 binding after conjugation relative to their unconjugated forms (3M12, FIGS. 11A and 11B; 5H12, FIGS. 11E and 11F). Interestingly, 3A4 clones show improved binding to cTfR1 after conjugation relative to their unconjugated forms (FIGS. 11C and 11D).

[0636] As used in this Example, the term ‘unconjugated’ indicates that the antibody was not conjugated to an oligonucleotide.

### Example 10. Knockdown of DMPK mRNA Level Facilitated by Antibody-Oligonucleotide Conjugates In Vitro

[0637] Conjugates containing humanized anti-TfR Fabs 3M12(VH3/Vk2), 3M-12 (VH4/Vk3), and 3A4(VH3-N54S/Vk4) were conjugated to a DMPK-targeting oligonucleotide AS0300 and were tested in rhabdomyosarcoma (RD) cells for knockdown of DMPK transcript expression. Antibodies were conjugated to ASO300 via the linker shown in Formula (C).

[0638] RD cells were cultured in a growth medium of DMEM with glutamine, supplemented with 10% FBS and penicillin/streptomycin until nearly confluent. Cells were then seeded into a 96 well plate at 20K cells per well and were allowed to recover for 24 hours. Cells were then treated with the conjugates for 3 days. Total RNA was collected from cells, cDNA was synthesized and DMPK expression was measured by qPCR.

[0639] Results in FIG. 12 show that DMPK expression level was reduced in cells treated with each indicated conjugate, relative to expression in PBS-treated cells, indicating that the humanized anti-TfR Fabs are able to mediate the uptake of the DMPK-targeting oligonucleotide by the RD cells and that the internalized DMPK-targeting oligonucleotide are effective in knocking down DMPK mRNA level.

[0640] Similarly, an oligonucleotide that induces DMD exon skipping can also be conjugated the humanized anti-TfR Fabs for delivery to muscle cells and inducing DMD exon skipping in muscle cells.

### Example 11. Anti-TfR-Oligonucleotide Conjugate Treatment Increased Dystrophin Expression in Mdx Mouse Model of DMD

[0641] To test the effects of another oligonucleotide that induces DMD exon skipping in vivo, an oligonucleotide (PMO) that induces exon 23 skipping was administered as naked oligonucleotide or in conjugate with an anti-mouse TfR antibody to the mdx mouse model of DMD. Dystrophin expression was measured. The exon skipping promoted by the conjugate resulted in dose-dependent production of dystrophin protein as illustrated by western blot (FIG. 14) and quantified in FIG. 15. Alpha-actin was used as a loading control.

[0642] A single dose of the exon 23-conjugate administered in the mdx mouse also restored dystrophin expression to the muscle cell membrane in addition to increasing overall dystrophin levels, as shown in FIG. 16. Immunofluorescence staining of dystrophin in quadricep muscles demonstrated that mdx mice treated with the conjugated had higher levels of dystrophin in their quadriceps than mice treated with naked oligonucleotide or saline.

### Example 12. Oligonucleotide-Mediated Exon Skipping in DMD Myotubes

[0643] Promoting the skipping of specific DMD exons in the nucleus could allow muscle cells to create more complete, functional dystrophin protein. An oligonucleotide (PMO) that induces skipping of DMD exon 51 was conjugated to an anti-TfR1 Fab and the conjugated was tested in human DMD myotubes with a mutation amenable to Exon 51 skipping. Treatment with the conjugate resulted in a 50% increase in exon skipping as compared to a 25% increase in exon skipping following treatment with an equimolar dose of the naked oligonucleotide (p-value=0.001), as shown in FIG. 13. Similar results were observed in the mdx mouse model of DMD, such as those shown in FIG. 5.

### Example 13. Serum Stability of the Linker Linking the Anti-TfR Antibody and the Molecular Payload

[0644] Oligonucleotides which were linked to antibodies in examples were conjugated via a cleavable linker shown in Formula (C). It is important that the linker maintain stability in serum and provide release kinetics that favor sufficient payload accumulation in the targeted muscle cell. This serum stability is important for systemic intravenous administration, stability of the conjugated oligonucleotide in the bloodstream, delivery to muscle tissue and internalization of the therapeutic payload in the muscle cells. The linker has been confirmed to facilitate precise conjugation of multiple types of payloads (including ASOs, siRNAs and PMOs) to Fabs. This flexibility enabled rational selection of the appropriate type of payload to address the genetic basis of each muscle disease. Additionally, the linker and conjugation chemistry allowed the optimization of the ratio of payload molecules attached to each Fab for each type of payload, and enabled rapid design, production and screening of molecules to enable use in various muscle disease applications.

[0645] FIG. 8 shows serum stability of the linker in vivo, which was comparable across multiple species over the course of 72 hours after intravenous dosing. At least 75% stability was measured in each case at 72 hours after dosing.

### Example 14. Exon-Skipping Activity of Anti-TfR Conjugates in DMD Patient Myotubes

[0646] In this study, the exon-skipping activities of anti-TfR conjugates containing an anti-TfR Fab (3M12 VH3/Vκ2, 3M12 VH4/Vκ3, and 3A4 VH3 N54S/Vκ4) conjugated to a DMD exon 51-skipping oligonucleotide were evaluated. Immortalized human myoblasts bearing an exon 52 deletion were thawed and seeded at a density of 1e6 cell/flask in Promocell Skeletal Cell Growth Media (with 5% FBS and 1× Pen-Strep) and allowed to grow to confluency. Once confluent, cells were trypsinized and pelleted via centrifugation and resuspended in fresh Promocell Skeletal Cell Growth Media. The cell number was counted and cells were seeded into Matrigel-coated 96-well plates at a density of 50 k cells/well. Cells were allowed to recover for 24 hours. Cells were induced to differentiate by aspirating the growth media and replacing with differentiation media with no serum. Cells were then treated with conjugated or unconjugated DMD exon skipping oligonucleotide at 10 μM. Cells were incubated with test articles for ten days then total RNA was harvested from the 96 well plates. cDNA synthesis was performed on 75 ng of total RNA, and mutation specific PCRs were performed to evaluate the degree of exon 51 skipping in each cell type. Mutation-specific PCR products were run on a 4% agarose gel and visualized using SYBR gold. Densitometry was used to calculate the relative amounts of the skipped and unskipped amplicon and exon skipping was determined as a ratio of the Exon 51 skipped amplicon divided by the total amount of amplicon present:

$$\% Exon Skipping = \frac{S k ipped Amplicon}{( S k ipped Amplicon + U n s k ipped Amplicon )} * 100$$

[0647] The results demonstrate that the conjugates with either 3M12 VH3/Vκ2 or 3M12 VH4/Vκ3 Fab covalently linked to the DMD exon 51-skipping oligonucleotide resulted in enhanced exon skipping compared to the unconjugated DMD exon skipping oligonucleotide in patient myotubes (FIG. 17).

[0648] As used in this Example, the term ‘unconjugated’ indicates that the oligonucleotide was not conjugated to an antibody.

### Example 15. Characterization of Binding Activities of Anti-TfR Fab 3M12 VH4/Vk3

[0649] In vitro studies were performed to test the specificity of anti-TfR Fab 3M12 VH4/Vκ3 for human and cynomolgus monkey TfR1 binding and to confirm its selectivity for human TfR1 vs TfR2. The binding affinity of anti-TfR Fab 3M12 VH4/Vκ3 to TfR1 from various species was determined using an enzyme-linked immunosorbent assay (ELISA). Serial dilutions of the Fab were added to plates precoated with recombinant human, cynomolgus monkey, mouse, or rat TfR1. After a short incubation, binding of the Fab was quantified by addition of a fluorescently tagged anti-(H+L) IgG secondary antibody and measurement of fluorescence intensity at 495 nm excitation and 520 nm emission. The Fab showed strong binding affinity to human and cynomolgus monkey TfR1, and no detectable binding of mouse or rat TfR1 was observed (FIG. 18). Surface plasmon resonance (SPR) measurements were also conducted, and results are shown in Table 18. The Kd of the Fab against the human TfR1 receptor was calculated to be 7.68×10⁻¹⁰ M and against the cynomolgus monkey TfR1 receptor was calculated to be 5.18×10⁻⁹ M.

TABLE 18
Kinetic analysis of anti-TfR Fab 3M12 VH4/Vk3 binding
to human and cynomolgus monkey TfR1 or human TfR2,
measured using surface plasmon resonance

| | Anti-TfR Fab 3M12 VH4/Vk3 | | | | |
|---|---|---|---|---|---|
| | | kₐ | | | |
| | K_{d} | (M⁻¹ | k_{d} | | Rₑₛ |
| Target | (M) | s⁻¹) | (s⁻¹) | Rₘₐₓ | SD |
| Human | 7.68E−10 | 1.66E+05 | 1.27E−04 | 1.11E+02 | 3.45E+00 |
| TfR1 | | | | | |
| Cyno | 5.18E−09 | 9.19E+04 | 4.76E−04 | 1.87E+02 | 6.24E+00 |
| TfR1 | | | | | |
| Human | ND | ND | ND | ND | ND |
| TfR2 | | | | | |

ND = No detectable binding by SPR (10 pM-100 uM)

[0650] To test for cross-reactivity of anti-TfR Fab 3M12 VH4/Vk3 to human TfR2, an ELISA was performed. Recombinant human TfR2 protein was plated overnight at 2 μg/mL and was blocked for 1 hour with 1% bovine serum albumin (BSA) in PBS. Serial dilutions of the Fab or a positive control anti-TfR2 antibody were added in 0.5% BSA/TBST for 1 hour. After washing, anti-(H+L) IgG-A488 (Invitrogen #MA5-25932) fluorescent secondary antibody was added at a 1:500 dilution in 0.5% BSA/TBST and the plate was incubated for 1 hour. Relative fluorescence was measured using a Biotek Synergy plate reader at 495 nm excitation and 520 nm emission. No binding of anti-TfR Fab 3M12 VH4/Vk3 to hTfR2 was observed (FIG. 19).

### Example 16. Serum Stability of Anti-TfR Fab-ASO Conjugate

[0651] Anti-TfR Fab VH4/Vk3 was conjugated to a control antisense oligonucleotide (ASO) via a linker as shown in Formula (C) and the resulting conjugate was tested for stability of the linker conjugating the Fab to the ASO. Serum stability was measured by incubating fluorescently labeled conjugate in PBS or in rat, mouse, cynomolgus monkey, or human serum and measuring relative fluorescence intensity over time, with higher fluorescence indicating more conjugate remaining intact. FIG. 20 shows serum stability was similar across multiple species and remained high after 72 hours.

### Example 17. Exon Skipping Activity of Anti-TfR Fab-ASO Conjugate In Vivo in Cynomolgus Monkeys

[0652] Anti-TfR Fab 3M12 VH4/Vk3 was conjugated to a dystrophin (DMD) exon 51-skipping antisense oligonucleotide (ASO) targeting an ESE as set forth in SEQ ID NO: 419. The exon 51 skipping oligonucleotide is a phosphorodiamidate morpholino oligomer (PMO) of 30 nucleotides in length. The exon skipping activity of the conjugate was tested in vivo in healthy non-human primates. Naïve male cynomolgus monkeys (n=4-5 per group) were administered two doses of vehicle, 30 mg/kg ASO alone, or 122 mg/kg conjugate (30 mg/kg ASO equivalent) via intravenous infusion on days 1 and 8. Animals were sacrificed and tissues harvested either 2 weeks or 4 weeks after the first dose was administered. Total RNA was collected from tissue samples using a Promega Maxwell@ RSC instrument and cDNA synthesis was performed using qScript cDNA SuperMix. Assessment of exon 51 skipping was performed using end-point PCR.

[0653] Capillary electrophoresis of the PCR products was used to assess exon skipping, and % exon 51 skipping was calculated using the following formula:

$$\% Exon Skipping = \frac{Molarity of Skipped Band}{Molarity of Skipped Band + Molarity of Unskipped Band} * 100.$$

Calculated exon 51 skipping results are shown in Table 19.

TABLE 19
Exon 51 skipping of dystrophin in cynomolgus monkey dystrophin

| | Time | | | | |
|---|---|---|---|---|---|
| | 2 weeks | | | 4 weeks | |
| | | ASO | | ASO | |
| Group | Vehicle | alone^{a} | Conjugate | alone^{a} | Conjugate |
| Conjugate dose^{b} | 0 | n/a | 122 | n/a | 122 |
| ASO alone Dose^{c} | 0 | 30 | 30 | 30 | 30 |
| Quadriceps ^{d} | 0.00 | 1.216 | 4.906 | 0.840 | 1.708 |
| | (0.00) | (1.083) | (3.131) | (1.169) | (1.395) |
| Diaphragm ^{d} | 0.00 | 1.891 | 7.315 | 0.717 | 9.225 |
| | (0.00) | (2.911) | (1.532) | (1.315) | (4.696) |
| Heart ^{d} | 0.00 | 0.043 | 3.42 | 0.00 | 4.525 |
| | (0.00) | (0.096) | (1.192) | (0.00) | (1.400) |
| Biceps ^{d} | 0.00 | 0.607 | 3.129 | 1.214 | 4.863 |
| | (0.00) | (0.615) | (0.912) | (1.441) | (3.881) |
| Tibialis anterior ^{d} | 0.00 | 0.699 | 1.042 | 0.384 | 0.816 |
| | (0.00) | (0.997) | (0.685) | (0.615) | (0.915) |
| Gastrocnemius ^{d} | 0.00 | 0.388 | 2.424 | 0.00 | 5.393 |
| | (0.00) | (0.573) | (2.329) | (0.00) | (2.695) |

^{a}ASO = antisense oligonucleotide.
^{b}Conjugate doses are listed as mg/kg of anti-TfR Fab 3M12 VH4/Vk3-ASO conjugate.
^{c}ASO doses are listed as mg/kg ASO equivalent of the anti-TfR Fab 3M12 VH4/Vk3-ASO dose.
^{d} Exon skipping values are mean % exon 51 skipping with standard deviations (n = 5) in parentheses.

[0654] Tissue ASO accumulation was also quantified using a hybridization ELISA with a probe complementary to the ASO sequence. A standard curve was generated and ASO levels (in ng/g) were derived from a linear regression of the standard curve. The ASO was distributed to all tissues evaluated at a higher level following the administration of the anti-TfR Fab VH4/Vk3-ASO conjugate as compared to the administration of unconjugated ASO. Intravenous administration of unconjugated ASO resulted in levels of ASO that were close to background levels in all tissues evaluated at 2 and 4 weeks after the first does was administered. Administration of anti-TfR Fab VH4/Vk3-ASO conjugate resulted in distribution of ASO through the tissues evaluated with a rank order of heart>diaphragm>bicep>quadriceps>gastrocnemious>tibialis anterior 2 weeks after first dosing. The duration of tissue concentration was also assessed. Concentrations of the ASO in quadriceps, bicep and diaphragm decreased by less than 50% over the time period evaluated (2 to 4 weeks), while levels of ASO in the heart, tibialis anterior, and gastrocnemius remained virtually unchanged (Table 20).

[0655] As used in this Example, the term ‘unconjugated’ indicates that the oligonucleotide was not conjugated to an antibody.

TABLE 20
Tissue distribution of DMD exon 51 skipping ASO in cynomolgus monkeys

| | Time | | | | |
|---|---|---|---|---|---|
| | 2 weeks | | | 4 weeks | |
| | | ASO | | ASO | |
| Group | Vehicle | alone^{a} | Conjugate | alone^{a} | Conjugate |
| Conjugate Dose^{b} | 0 | n/a | 122 | n/a | 122 |
| ASO alone Dose^{c} | 0 | 30 | 30 | 30 | 30 |
| Quadriceps ^{d} | 0 | 696.8 | 2436 | 197 | 682 |
| | (59.05) | (868.15) | (954.0) | (134) | (281) |
| Diaphragm ^{d} | 0 ± | 580.02 | 6750 | 60 | 3131 |
| | (144.3) | (360.11) | (2256) | (120) | (1618) |
| Heart ^{d} | 0 | 1449 | 27138 | 943 | 30410 |
| | (396.03) | (1337) | (6315) | (1803) | (9247) |
| Biceps ^{d} | 0 | 615.63 | 2840 | 130 | 1326 |
| | (69.58) | (335.17) | (980.31) | (80) | (623) |
| Tibialis anterior ^{d} | 0 | 564.71 | 1591 | 169 | 1087 |
| | (76.31) | (327.88) | (253.50) | (110) | (514) |
| Gastrocnemius ^{d} | 0 | 705.47 | 2096 | 170 | 1265 |
| | (41.15) | (863.75) | (474.04) | (69) | (272) |

^{a}ASO = Antisense oligonucleotide.
^{b}Conjugate doses are listed as mg/kg of anti-TfR Fab 3M12 VH4/Vk3-ASO conjugate.
^{c}ASO doses are listed as mg/kg ASO or ASO equivalent of the anti-TfR Fab 3M12 VH4/Vk3-ASO conjugate dose.
^{d} ASO values are mean concentrations of ASO in tissue as ng/g with standard deviations (n = 5) in parentheses.

### Example 18. Effect of Conjugates Containing an Anti-TfR1 Fab Conjugated to an Oligonucleotide that Induces DMD Exon 23 Skipping on Biomarker Expression and Muscle Function in Mdx Mice

[0656] The objective of this study was to determine the effect of a single dose of anti-mouse TfR Fab conjugated to an antisense oligonucleotide (Ab-ASO) or of a single dose of the same naked ASO on dystrophin expression and muscle function in mdx mice. The complex used in this example was DTX-C-042 as described in Example 5.

[0657] Seven-week-old male mdx homozygous mice were allocated randomly to each of eight treatment groups. The mice were administered via tail vein a singled dose of ASO at 30 mg/kg, Ab-ASO at a dose equivalent to 30 mg/kg of ASO, or saline. Tissues were harvested and analyzed 2 weeks or 4 weeks following administration.

[0658] Measurement of exon 23 skipping in muscles: Quantification of exon 23 skipping was performed using a single-step RT-PCR reaction using the SuperScript® III (Thermo Fisher) with 75 ng total RNA input. The PCR primers used were 5′-CACATCTTTGATGGTGTGAGG (forward) (SEQ ID NO: 2264) and 5′-CAACTTCAGCCATCCATTTCTG (reverse) (SEQ ID NO: 2253). Capillary electrophoresis was used to quantitate the skipped and unskipped bands in the skeletal muscles of interest using the following equation:

$$\% Exon 23 Skipping = \frac{Skipped Band}{Skipped Band + Unskipped Band} \times 100.$$

The results demonstrate that a single administration of anti-TfR Fab-oligonucleotide conjugate (Ab-ASO) facilitated significant increases in skipping of exon 23 in quadriceps (FIG. 21A), heart (FIG. 21B), and diaphragm (FIG. 21C) of mdx mice. By contrast, little or no exon 23 skipping was observed in the same muscle tissues in wild-type (WT) mice or in mdx mice treated with saline or naked ASO.

[0659] Measurement of dystrophin protein in muscles: Muscle tissue samples taken from the quadriceps were homogenized and protein concentrations were measured by BCA assay. Total protein (25 μg) was loaded onto a 3% to 8% Tris-acetate protein gel and run at 150 V for 1 hour. The gel was then transferred to a polyvinylidene difluoride membrane, and the membrane was cut, and the portion containing dystrophin was incubated overnight in anti-dystrophin antibody (Abcam catalog #15277) at 4° C., followed by goat anti-rabbit IgG (H+L) horseradish peroxidase conjugate (Bio-Rad) for 30 minutes at room temperature. As a control, the remaining portion of the blot was incubated overnight with anti-alpha-actinin antibody (Abcam catalog #9465) at 4° C., followed by goat anti-mouse IgG (H+L) horseradish peroxidase conjugate (Bio-Rad) for 15 minutes at room temperature. The blot was developed using the ECL Western Detection Kit (Cytiva) and quantified using iBright analysis software (Thermo Fisher Scientific). Images of Western blots are shown for muscle tissues collected two-weeks following injections in FIGS. 22A (quadriceps), 23A (heart), and 24A (diaphragm), and quantification of the Western blot results are shown in FIGS. 22B (quadriceps), 23B (heart), and 24B (diaphragm). Images of western blots are shown for muscle tissues collected four-weeks following injections in FIGS. 22C (quadriceps), 23C (heart), and 25C (diaphragm), and quantification of the Western blot results are shown in FIGS. 22D (quadriceps), 23D (heart), and 24D (diaphragm). In each western blot, the standard curve was generated using pooled protein from wild-type and mdx tissues, and the percentage wild-type (% WT) protein in each standard indicates the amount of wild-type protein in the sample. FIGS. 22A-22D demonstrate that two- and four-weeks following administration, Ab-ASO facilitated increases in dystrophin protein in quadriceps to a greater extent than unconjugated ASO. FIGS. 23A-23D demonstrate that two- and four-weeks following administration, Ab-ASO facilitated increases in dystrophin protein in heart muscle, whereas little to no wild-type dystrophin was measured in heart muscle from mice treated with naked ASO. FIGS. 24A-24D demonstrate that two- and four-weeks following administration, Ab-ASO facilitated increases in dystrophin protein in diaphragm muscle, whereas little to no wild-type dystrophin was measured in diaphragm muscle from mice treated with naked ASO.

[0660] Measurement of ASO content within tissues: Enzyme-linked immunosorbent assay (ELISA) was performed by coating NeutrAvidin coated plates with a capture probe specific to the ASO of interest. Proteinase K digested tissue lysate was incubated on the coated plates to allow binding of the ASO of interest to the capture probe. Plates were then washed and unbound capture probe was digested with micrococcal nuclease, followed by further washing and blocking. A Digoxigenin HRP-conjugated antibody was added to bind to intact capture probe, then imaged using TMB substrate (R&D Systems, Inc.). Quantification was performed using a standard curve of known concentration diluted into skeletal muscle matrix. The results demonstrate that administration of the Fab conjugate is able to achieve substantial accumulation of ASO within quadriceps (FIG. 25A), diaphragm (FIG. 25B), and heart (FIG. 25C), whereas administration of naked ASO showed little or no ASO content in each muscle tissue. These results demonstrate that little or no ASO was detected in muscle tissues of mice administered saline or naked ASO, whereas administration of Ab-ASO resulted in measurable quantities of ASO in each of the tissues tested two- and four-weeks following administration.

### Example 19. Conjugation of DMD Exon 53-Skipping Oligonucleotides to Anti-TfR1 Antibodies Improves their Potency

[0661] To test the effect of anti-TfR1 targeting on exon 53-skipping oligonucleotides, complexes were formed comprising an anti-TfR1 Fab antibody (3M12 VH4/Vk3) covalently linked to exon 53-skipping PMOs via a linker having the structure of formula (C). Two exon 53-skipping PMOs were used in this Example: exon 53 PMO-A, comprising the sequence GTTGCCTCCGGTTCTGAAGGTGTTC (SEQ ID NO: 2256), and exon 53 PMO-B, comprising the sequence CCTCCGGTTCTGAAGGTGTTC (SEQ ID NO: 2257).

[0662] First, the exon 53-skipping PMOs alone were tested for their ability to facilitate skipping of exon 53 following gymnotic uptake (i.e., without transfection agent or modification to confer muscle targeting). KM1328 DMD patient cells which harbor a deletion of DMD exon 52 were treated with a range of concentrations of exon 53 PMO-A or exon 53 PMO-B, and exon 53 skipping was measured. As shown in FIG. 26, exon 53 PMO-A was about 2-fold more potent than exon 53 PMO-B. Based on the dose response curves, it was calculated that a concentration of 2.5 μM of exon 53 PMO-A or 4.7 μM of exon 53 PMO-B is required to achieve 50% skipping of exon 53.

[0663] Next, complexes comprising the anti-TfR1 Fab covalently linked to either exon 53 PMO-A or exon 53 PMO-B (“anti-TfR1 Fab-ASO complex”) were tested for their ability to facilitate skipping of exon 53 in KM1328 DMD patient cells in comparison with the same PMOs not linked to an antibody (“naked ASO”). Cells were treated with the naked ASO at concentrations of 0.16 μM, 0.32 μM, 0.63 μM, or 1.25 μM, or with the anti-TfR1 Fab-ASO complex at ASO equivalent concentrations of 0.16 μM, 0.32 μM, 0.63 μM, or 1.25 μM. As shown in FIG. 27, the Fab-ASO complexes achieved greater exon 53 skipping than did the naked ASO at each of the tested concentrations, including achieving significantly improved exon 53 skipping by exon 53 PMO-A at the lower doses tested (0.16 μM, 0.32 μM, and 0.63 μM). These results demonstrate that covalently linking exon-skipping oligonucleotides to anti-TfR1 antibodies can facilitate exon-skipping activity at lower doses, thereby enabling efficacy of the oligonucleotides at lower doses.

### Additional Embodiments

[0664] 1. A complex comprising a muscle-targeting agent covalently linked to a molecular payload configured for promoting the expression or activity of a DMD gene, wherein the muscle-targeting agent specifically binds to an internalizing cell surface receptor on muscle cells, wherein the muscle targeting agent is a humanized antibody, wherein the antibody comprises:
[0665] (i) a heavy chain variable region (VH) comprising an amino acid sequence at least 85% identical to SEQ ID NO: 69; and/or a light chain variable region (VL) comprising an amino acid sequence at least 85% identical to SEQ ID NO: 70;
[0666] (ii) a heavy chain variable region (VH) comprising an amino acid sequence at least 85% identical to SEQ ID NO: 71; and/or a light chain variable region (VL) comprising an amino acid sequence at least 85% identical to SEQ ID NO: 70;
[0667] (iii) a heavy chain variable region (VH) comprising an amino acid sequence at least 85% identical to SEQ ID NO: 72; and/or a light chain variable region (VL) comprising an amino acid sequence at least 85% identical to SEQ ID NO: 70;
[0668] (iv) a heavy chain variable region (VH) comprising an amino acid sequence at least 85% identical to SEQ ID NO: 73; and/or a light chain variable region (VL) comprising an amino acid sequence at least 85% identical to SEQ ID NO: 74;
[0669] (v) a heavy chain variable region (VH) comprising an amino acid sequence at least 85% identical to SEQ ID NO: 73; and/or a light chain variable region (VL) comprising an amino acid sequence at least 85% identical to SEQ ID NO: 75;
[0670] (vi) a heavy chain variable region (VH) comprising an amino acid sequence at least 85% identical to SEQ ID NO: 76; and/or a light chain variable region (VL) comprising an amino acid sequence at least 85% identical to SEQ ID NO: 74;
[0671] (vii) a heavy chain variable region (VH) comprising an amino acid sequence at least 85% identical to SEQ ID NO: 76; and/or a light chain variable region (VL) comprising an amino acid sequence at least 85% identical to SEQ ID NO: 75;
[0672] (viii) a heavy chain variable region (VH) comprising an amino acid sequence at least 85% identical to SEQ ID NO: 77; and/or a light chain variable region (VL) comprising an amino acid sequence at least 85% identical to SEQ ID NO: 78;
[0673] (ix) a heavy chain variable region (VH) comprising an amino acid sequence at least 85% identical to SEQ ID NO: 79; and/or a light chain variable region (VL) comprising an amino acid sequence at least 85% identical to SEQ ID NO: 80; or
[0674] (x) a heavy chain variable region (VH) comprising an amino acid sequence at least 85% identical to SEQ ID NO: 77; and/or a light chain variable region (VL) comprising an amino acid sequence at least 85% identical to SEQ ID NO: 80.

[0675] 2. The complex of embodiment 1, wherein the antibody comprises:
[0676] (i) a VH comprising the amino acid sequence of SEQ ID NO: 69 and a VL comprising the amino acid sequence of SEQ ID NO: 70;
[0677] (ii) a VH comprising the amino acid sequence of SEQ ID NO: 7land a VL comprising the amino acid sequence of SEQ ID NO: 70;
[0678] (iii) a VH comprising the amino acid sequence of SEQ ID NO: 72 and a VL comprising the amino acid sequence of SEQ ID NO: 70;
[0679] (iv) a VH comprising the amino acid sequence of SEQ ID NO: 73 and a VL comprising the amino acid sequence of SEQ ID NO: 74;
[0680] (v) a VH comprising the amino acid sequence of SEQ ID NO: 73 and a VL comprising the amino acid sequence of SEQ ID NO: 75;
[0681] (vi) a VH comprising the amino acid sequence of SEQ ID NO: 76 and a VL comprising the amino acid sequence of SEQ ID NO: 74;
[0682] (vii) a VH comprising the amino acid sequence of SEQ ID NO: 76 and a VL comprising the amino acid sequence of SEQ ID NO: 75;
[0683] (viii) a VH comprising the amino acid sequence of SEQ ID NO: 77 and a VL comprising the amino acid sequence of SEQ ID NO: 78;
[0684] (ix) a VH comprising the amino acid sequence of SEQ ID NO: 79 and a VL comprising the amino acid sequence of SEQ ID NO: 80; or
[0685] (x) a VH comprising the amino acid sequence of SEQ ID NO: 77 and a VL comprising the amino acid sequence of SEQ ID NO: 80.

[0686] 3. The complex of embodiment 1 or embodiment 2, wherein the antibody is selected from the group consisting of a full-length IgG, a Fab fragment, a Fab′ fragment, a F(ab′)₂ fragment, a scFv, and a Fv.

[0687] 4. The complex of embodiment 3, wherein the antibody is a full-length IgG, optionally wherein the full-length IgG comprises a heavy chain constant region of the isotype IgG1, IgG2, IgG3, or IgG4.

[0688] 5. The complex of embodiment 4, wherein the antibody comprises:
[0689] (i) a heavy chain comprising an amino acid sequence at least 85% identical to SEQ ID NO: 84; and/or a light chain comprising an amino acid sequence at least 85% identical to SEQ ID NO: 85;
[0690] (ii) a heavy chain comprising an amino acid sequence at least 85% identical to SEQ ID NO: 86; and/or a light chain comprising an amino acid sequence at least 85% identical to SEQ ID NO: 85;
[0691] (iii) a heavy chain comprising an amino acid sequence at least 85% identical to SEQ ID NO: 87; and/or a light chain comprising an amino acid sequence at least 85% identical to SEQ ID NO: 85;
[0692] (iv) a heavy chain comprising an amino acid sequence at least 85% identical to SEQ ID NO: 88; and/or a light chain comprising an amino acid sequence at least 85% identical to SEQ ID NO: 89;
[0693] (v) a heavy chain comprising an amino acid sequence at least 85% identical to SEQ ID NO: 88; and/or a light chain comprising an amino acid sequence at least 85% identical to SEQ ID NO: 90;
[0694] (vi) a heavy chain comprising an amino acid sequence at least 85% identical to SEQ ID NO: 91; and/or a light chain comprising an amino acid sequence at least 85% identical to SEQ ID NO: 89;
[0695] (vii) a heavy chain comprising an amino acid sequence at least 85% identical to SEQ ID NO: 91; and/or a light chain comprising an amino acid sequence at least 85% identical to SEQ ID NO: 90;
[0696] (viii) a heavy chain comprising an amino acid sequence at least 85% identical to SEQ ID NO: 92; and/or a light chain comprising an amino acid sequence at least 85% identical to SEQ ID NO: 93;
[0697] (ix) a heavy chain comprising an amino acid sequence at least 85% identical to SEQ ID NO: 94; and/or a light chain comprising an amino acid sequence at least 85% identical to SEQ ID NO: 95; or
[0698] (x) a heavy chain comprising an amino acid sequence at least 85% identical to SEQ ID NO: 92; and/or a light chain comprising an amino acid sequence at least 85% identical to SEQ ID NO: 95.

[0699] 6. The complex of embodiment 3, wherein the antibody is a Fab fragment.

[0700] 7. The complex of embodiment 6, wherein the antibody comprises:
[0701] (i) a heavy chain comprising an amino acid sequence at least 85% identical to SEQ ID NO: 97; and/or a light chain comprising an amino acid sequence at least 85% identical to SEQ ID NO: 85;
[0702] (ii) a heavy chain comprising an amino acid sequence at least 85% identical to SEQ ID NO: 98; and/or a light chain comprising an amino acid sequence at least 85% identical to SEQ ID NO: 85;
[0703] (iii) a heavy chain comprising an amino acid sequence at least 85% identical to SEQ ID NO: 99; and/or a light chain comprising an amino acid sequence at least 85% identical to SEQ ID NO: 85;
[0704] (iv) a heavy chain comprising an amino acid sequence at least 85% identical to SEQ ID NO: 100; and/or a light chain comprising an amino acid sequence at least 85% identical to SEQ ID NO: 89;
[0705] (v) a heavy chain comprising an amino acid sequence at least 85% identical to SEQ ID NO: 100; and/or a light chain comprising an amino acid sequence at least 85% identical to SEQ ID NO: 90;
[0706] (vi) a heavy chain comprising an amino acid sequence at least 85% identical to SEQ ID NO: 101; and/or a light chain comprising an amino acid sequence at least 85% identical to SEQ ID NO: 89;
[0707] (vii) a heavy chain comprising an amino acid sequence at least 85% identical to SEQ ID NO: 101; and/or a light chain comprising an amino acid sequence at least 85% identical to SEQ ID NO: 90;
[0708] (viii) a heavy chain comprising an amino acid sequence at least 85% identical to SEQ ID NO: 102; and/or a light chain comprising an amino acid sequence at least 85% identical to SEQ ID NO: 93;
[0709] (ix) a heavy chain comprising an amino acid sequence at least 85% identical to SEQ ID NO: 103; and/or a light chain comprising an amino acid sequence at least 85% identical to SEQ ID NO: 95; or
[0710] (x) a heavy chain comprising an amino acid sequence at least 85% identical to SEQ ID NO: 102; and/or a light chain comprising an amino acid sequence at least 85% identical to SEQ ID NO: 95.

[0711] 8. The complex of embodiment 6 or embodiment 7, wherein the antibody comprises:
[0712] (i) a heavy chain comprising the amino acid sequence of SEQ ID NO: 97; and a light chain comprising the amino acid sequence of SEQ ID NO: 85;
[0713] (ii) a heavy chain comprising the amino acid sequence of SEQ ID NO: 98; and a light chain comprising the amino acid sequence of SEQ ID NO: 85;
[0714] (iii) a heavy chain comprising the amino acid sequence of SEQ ID NO: 99; and a light chain comprising the amino acid sequence of SEQ ID NO: 85;
[0715] (iv) a heavy chain comprising the amino acid sequence of SEQ ID NO: 100; and a light chain comprising the amino acid sequence of SEQ ID NO: 89;
[0716] (v) a heavy chain comprising the amino acid sequence of SEQ ID NO: 100; and a light chain comprising the amino acid sequence of SEQ ID NO: 90;
[0717] (vi) a heavy chain comprising the amino acid sequence of SEQ ID NO: 101; and a light chain comprising the amino acid sequence of SEQ ID NO: 89;
[0718] (vii) a heavy chain comprising the amino acid sequence of SEQ ID NO: 101; and a light chain comprising the amino acid sequence of SEQ ID NO: 90;
[0719] (viii) a heavy chain comprising the amino acid sequence of SEQ ID NO: 102; and a light chain comprising the amino acid sequence of SEQ ID NO: 93;
[0720] (ix) a heavy chain comprising the amino acid sequence of SEQ ID NO: 103; and a light chain comprising the amino acid sequence of SEQ ID NO: 95; or
[0721] (x) a heavy chain comprising the amino acid sequence of SEQ ID NO: 102; and a light chain comprising the amino acid sequence of SEQ ID NO: 95.

[0722] 9. The complex of any one of embodiments 1 to 8, wherein the equilibrium dissociation constant (K_{D}) of binding of the antibody to the transferrin receptor is in a range from 10⁻¹¹ M to 10⁻⁶ M.

[0723] 10. The complex of any one of embodiments 1 to 9, wherein the antibody does not specifically bind to the transferrin binding site of the transferrin receptor and/or wherein the muscle-targeting antibody does not inhibit binding of transferrin to the transferrin receptor.

[0724] 11. The complex of any one of embodiments 1 to 10, wherein the antibody is cross-reactive with extracellular epitopes of two or more of a human, non-human primate and rodent transferrin receptor.

[0725] 12. The complex of any one of embodiments 1 to 11, wherein the complex is configured to promote transferrin receptor mediated internalization of the molecular payload into a muscle cell.

[0726] 13. The complex of any one of embodiments 1 to 12, wherein the antibody is a chimeric antibody, optionally wherein the chimeric antibody is a humanized monoclonal antibody.

[0727] 14. The complex of any one of embodiments 1 to 13, wherein the antibody is in the form of a ScFv, Fab fragment, Fab′ fragment, F(ab′)₂ fragment, or Fv fragment.

[0728] 15. The complex of any one of embodiments 1 to 14, wherein the molecular payload is an oligonucleotide.

[0729] 16. The complex of embodiment 15, wherein the oligonucleotide comprises a sequence listed in Table 14.

[0730] 16.1. The complex of embodiment 15, wherein the oligonucleotide comprises any one of SEQ ID NO: 437-1241, or is complementary to any one of SEQ ID NO: 1242-2046.

[0731] 17. The complex of embodiment 16 or embodiment 16.1, wherein the oligonucleotide comprises a region of complementarity to a mutated DMD allele.

[0732] 18. The complex of any one of embodiments 1 to 14, wherein the molecular payload is a polypeptide.

[0733] 19. The complex of embodiment 18, wherein the polypeptide is a functional fragment of dystrophin protein.

[0734] 20. The complex of any one of embodiments 15 to 17, wherein the oligonucleotide is configured to suppress a truncating mutation in a DMD allele by mono- or multi-exon skipping.

[0735] 21. The complex of any one of embodiments 15 to 17, wherein the oligonucleotide promotes antisense-mediated exon skipping to produce in-frame dystrophin mRNA.

[0736] 22. The complex of embodiment 21, wherein the oligonucleotide promotes skipping of an exon of DMD in the range of exon 8 to exon 55, optionally exon 23 to exon 53.

[0737] 23. The complex of embodiment 22, wherein the oligonucleotide promotes skipping of exon 8, exon 23, exon 44, exon 45, exon 50, exon 51, exon 52, exon 53, and/or exon 55.

[0738] 24. The complex of embodiment 21, wherein the oligonucleotide promotes skipping of exon 51.

[0739] 25. The complex of embodiment 24, wherein the oligonucleotide promotes skipping of multiple exons in the range of exon 44 to exon 53.

[0740] 26. The complex of any one of embodiments 15 to 17 or 20 to 25, wherein the oligonucleotide comprises at least one modified internucleotide linkage.

[0741] 27. The complex of embodiment 26, wherein the at least one modified internucleotide linkage is a phosphorothioate linkage.

[0742] 28. The complex of embodiment 27, wherein the oligonucleotide comprises phosphorothioate linkages in the Rp stereochemical conformation and/or in the Sp stereochemical conformation.

[0743] 29. The complex of embodiment 28, wherein the oligonucleotide comprises phosphorothioate linkages that are all in the Rp stereochemical conformation or that are all in the Sp stereochemical conformation.

[0744] 30. The complex of any one of embodiments 15 to 17 or 20 to 29, wherein the oligonucleotide comprises one or more modified nucleotides.

[0745] 31. The complex of embodiment 30, wherein the one or more modified nucleotides are 2′-modified nucleotides.

[0746] 32. The complex of any one of embodiments 15 to 17 or 20 to 31, wherein the oligonucleotide is a gapmer oligonucleotide that directs RNAse H-mediated cleavage of an miRNA that negatively regulates DMD expression in a cell, optionally wherein the miRNA is miR-31.

[0747] 33. The complex of embodiment 32, wherein the gapmer oligonucleotide comprises a central portion of 5 to 15 deoxyribonucleotides flanked by wings of 2 to 8 modified nucleotides.

[0748] 34. The complex of embodiment 33, wherein the modified nucleotides of the wings are 2′-modified nucleotides.

[0749] 35. The complex of any one of embodiments 15 to 17 or 20 to 31, wherein the oligonucleotide is a mixmer oligonucleotide.

[0750] 36. The complex of embodiment 35, wherein the mixmer oligonucleotide promotes exon skipping.

[0751] 37. The complex of embodiment 35 or 36, wherein the mixmer oligonucleotide comprises two or more different 2′ modified nucleotides.

[0752] 38. The complex of any one of embodiments 15 to 17 or 20 to 31, wherein the oligonucleotide is an RNAi oligonucleotide that promotes RNAi-mediated cleavage of an miRNA that negatively regulates DMD expression in a cell, optionally wherein the miRNA is miR-31.

[0753] 39. The complex of embodiment 38, wherein the RNAi oligonucleotide is a double-stranded oligonucleotide of 19 to 25 nucleotides in length.

[0754] 40. The complex of embodiment 38 or 39, wherein the RNAi oligonucleotide comprises at least one 2′ modified nucleotide.

[0755] 41. The complex of any one of embodiments 31, 34, 37, or 40, wherein each 2′ modified nucleotide is selected from the group consisting of: 2′-O-methyl, 2′-fluoro (2′-F), 2′-O-methoxyethyl (2′-MOE), and 2′, 4′-bridged nucleotides.

[0756] 42. The complex of embodiment 30, wherein the one or more modified nucleotides are bridged nucleotides.

[0757] 43. The complex of any one of embodiments 31, 34, 37, or 40, wherein at least one 2′ modified nucleotide is a 2′,4′-bridged nucleotide selected from: 2′,4′-constrained 2′-O-ethyl (cEt) and locked nucleic acid (LNA) nucleotides.

[0758] 44. The complex of any one of embodiments 15 to 17 or 20 to 31, wherein the oligonucleotide comprises a guide sequence for a genome editing nuclease.

[0759] 45. The complex of any one of embodiments 15 to 17 or 20 to 31, wherein the oligonucleotide is phosphorodiamidate morpholino oligomer.

[0760] 46. The complex of any one of embodiments 1 to 45, wherein the muscle-targeting agent is covalently linked to the molecular payload via a cleavable linker.

[0761] 47. The complex of embodiment 46, wherein the cleavable linker is selected from: a protease-sensitive linker, pH-sensitive linker, and glutathione-sensitive linker.

[0762] 48. The complex of embodiment 47, wherein the cleavable linker is a protease-sensitive linker.

[0763] 49. The complex of embodiment 48, wherein the protease-sensitive linker comprises a sequence cleavable by a lysosomal protease and/or an endosomal protease.

[0764] 50. The complex of embodiment 48, wherein the protease-sensitive linker comprises a valine-citrulline dipeptide sequence.

[0765] 51. The complex of embodiment 47, wherein the linker is pH-sensitive linker that is cleaved at a pH in a range of 4 to 6.

[0766] 52. The complex of any one of embodiments 1 to 45, wherein the muscle-targeting agent is covalently linked to the molecular payload via a non-cleavable linker.

[0767] 53. The complex of embodiment 52, wherein the non-cleavable linker is an alkane linker.

[0768] 54. The complex of any one of embodiments 1 to 53, wherein the antibody comprises a non-natural amino acid to which the oligonucleotide is covalently linked.

[0769] 55. The complex of any one of embodiments 1 to 53, wherein the antibody is covalently linked to the oligonucleotide via conjugation to a lysine residue or a cysteine residue of the antibody.

[0770] 56. The complex of embodiment 55, wherein the oligonucleotide is conjugated to the cysteine of the antibody via a maleimide-containing linker, optionally wherein the maleimide-containing linker comprises a maleimidocaproyl or maleimidomethyl cyclohexane-1-carboxylate group.

[0771] 57. The complex of any one of embodiments 1 to 56, wherein the antibody is a glycosylated antibody that comprises at least one sugar moiety to which the oligonucleotide is covalently linked.

[0772] 58. The complex of embodiment 57, wherein the sugar moiety is a branched mannose.

[0773] 59. The complex of embodiment 57 or 58, wherein the antibody is a glycosylated antibody that comprises one to four sugar moieties each of which is covalently linked to a separate oligonucleotide.

[0774] 60. The complex of embodiment 57, wherein the antibody is a fully-glycosylated antibody.

[0775] 61. The complex of embodiment 57, wherein the antibody is a partially-glycosylated antibody.

[0776] 62. The complex of embodiment 61, wherein the partially-glycosylated antibody is produced via chemical or enzymatic means.

[0777] 63. The complex of embodiment 61, wherein the partially-glycosylated antibody is produced in a cell that is deficient for an enzyme in the N- or O- glycosylation pathway.

[0778] 64. A method of delivering a molecular payload to a cell expressing transferrin receptor, the method comprising contacting the cell with the complex of any one of embodiments 1 to 63.

[0779] 65. A method of promoting the expression or activity of a DMD protein in a cell, the method comprising contacting the cell with the complex of any one of embodiments 1 to 63 in an amount effective for promoting internalization of the molecular payload to the cell.

[0780] 66. The method of embodiment 65, wherein the cell is in vitro.

[0781] 67. The method of embodiment 65, wherein the cell is in a subject.

[0782] 68. The method of embodiment 67, wherein the subject is a human.

[0783] 69. A method of treating a subject having a mutated DMD allele that is associated with a dystrophinopathy, the method comprising administering to the subject an effective amount of the complex of any one of embodiments 1 to 63.

[0784] 70. A method of promoting skipping of an exon of a DMD mRNA transcript in a cell, the method comprising administering to the cell an effective amount of the complex of any one of embodiments 1 to 63.

[0785] 71. The method of embodiment 70, wherein the method promotes skipping of exon 8, exon 23, exon 44, exon 45, exon 50, exon 51, exon 52, exon 53, and/or exon 55 of the DMD mRNA transcript.

[0786] 72. The method of embodiment 70 or 71, wherein the method promotes skipping of exon 51 of the DMD mRNA transcript.

[0787] 73. A complex comprising an anti-transferrin receptor (TfR) antibody covalently linked to a molecular payload configured for promoting the expression or activity of a DMD gene, wherein the antibody comprises:
[0788] (i) a heavy chain variable region (VH) comprising an amino acid sequence at least 85% identical to SEQ ID NO: 76; and/or a light chain variable region (VL) comprising an amino acid sequence at least 85% identical to SEQ ID NO: 75;
[0789] (ii) a heavy chain variable region (VH) comprising an amino acid sequence at least 85% identical to SEQ ID NO: 69; and/or a light chain variable region (VL) comprising an amino acid sequence at least 85% identical to SEQ ID NO: 70;
[0790] (iii) a heavy chain variable region (VH) comprising an amino acid sequence at least 85% identical to SEQ ID NO: 71; and/or a light chain variable region (VL) comprising an amino acid sequence at least 85% identical to SEQ ID NO: 70;
[0791] (iv) a heavy chain variable region (VH) comprising an amino acid sequence at least 85% identical to SEQ ID NO: 72; and/or a light chain variable region (VL) comprising an amino acid sequence at least 85% identical to SEQ ID NO: 70;
[0792] (v) a heavy chain variable region (VH) comprising an amino acid sequence at least 85% identical to SEQ ID NO: 73; and/or a light chain variable region (VL) comprising an amino acid sequence at least 85% identical to SEQ ID NO: 74;
[0793] (vi) a heavy chain variable region (VH) comprising an amino acid sequence at least 85% identical to SEQ ID NO: 73; and/or a light chain variable region (VL) comprising an amino acid sequence at least 85% identical to SEQ ID NO: 75;
[0794] (vii) a heavy chain variable region (VH) comprising an amino acid sequence at least 85% identical to SEQ ID NO: 76; and/or a light chain variable region (VL) comprising an amino acid sequence at least 85% identical to SEQ ID NO: 74;
[0795] (viii) a heavy chain variable region (VH) comprising an amino acid sequence at least 85% identical to SEQ ID NO: 77; and/or a light chain variable region (VL) comprising an amino acid sequence at least 85% identical to SEQ ID NO: 78;
[0796] (ix) a heavy chain variable region (VH) comprising an amino acid sequence at least 85% identical to SEQ ID NO: 79; and/or a light chain variable region (VL) comprising an amino acid sequence at least 85% identical to SEQ ID NO: 80; or
[0797] (x) a heavy chain variable region (VH) comprising an amino acid sequence at least 85% identical to SEQ ID NO: 77; and/or a light chain variable region (VL) comprising an amino acid sequence at least 85% identical to SEQ ID NO: 80.

[0798] 73. A complex comprising an anti-transferrin receptor (TfR) antibody covalently linked to a molecular payload configured for promoting the expression or activity of a DMD gene, wherein the anti-TfR antibody has undergone pyroglutamate formation resulting from a post-translational modification.

### EQUIVALENTS AND TERMINOLOGY

[0799] The disclosure illustratively described herein suitably can be practiced in the absence of any element or elements, limitation or limitations that are not specifically disclosed herein. Thus, for example, in each instance herein any of the terms “comprising”, “consisting essentially of”, and “consisting of” may be replaced with either of the other two terms. The terms and expressions which have been employed are used as terms of description and not of limitation, and there is no intention that in the use of such terms and expressions of excluding any equivalents of the features shown and described or portions thereof, but it is recognized that various modifications are possible within the scope of the disclosure. Thus, it should be understood that although the present disclosure has been specifically disclosed by preferred embodiments, optional features, modification and variation of the concepts herein disclosed may be resorted to by those skilled in the art, and that such modifications and variations are considered to be within the scope of this disclosure.

[0800] In addition, where features or aspects of the disclosure are described in terms of Markush groups or other grouping of alternatives, those skilled in the art will recognize that the disclosure is also thereby described in terms of any individual member or subgroup of members of the Markush group or other group.

[0801] It should be appreciated that, in some embodiments, sequences presented in the sequence listing may be referred to in describing the structure of an oligonucleotide or other nucleic acid. In such embodiments, the actual oligonucleotide or other nucleic acid may have one or more alternative nucleotides (e.g., an RNA counterpart of a DNA nucleotide or a DNA counterpart of an RNA nucleotide) and/or (e.g., and) one or more modified nucleotides and/or (e.g., and) one or more modified internucleotide linkages and/or (e.g., and) one or more other modification compared with the specified sequence while retaining essentially same or similar complementary properties as the specified sequence.

[0802] The use of the terms “a” and “an” and “the” and similar referents in the context of describing the invention (especially in the context of the following claims) are to be construed to cover both the singular and the plural, unless otherwise indicated herein or clearly contradicted by context. The terms “comprising,” “having,” “including,” and “containing” are to be construed as open-ended terms (i.e., meaning “including, but not limited to,”) unless otherwise noted. Recitation of ranges of values herein are merely intended to serve as a shorthand method of referring individually to each separate value falling within the range, unless otherwise indicated herein, and each separate value is incorporated into the specification as if it were individually recited herein. All methods described herein can be performed in any suitable order unless otherwise indicated herein or otherwise clearly contradicted by context. The use of any and all examples, or exemplary language (e.g., “such as”) provided herein, is intended merely to better illuminate the invention and does not pose a limitation on the scope of the invention unless otherwise claimed. No language in the specification should be construed as indicating any non-claimed element as essential to the practice of the invention.

[0803] Embodiments of this invention are described herein. Variations of those embodiments may become apparent to those of ordinary skill in the art upon reading the foregoing description.

The inventors expect skilled artisans to employ such variations as appropriate, and the inventors intend for the invention to be practiced otherwise than as specifically described herein. Accordingly, this invention includes all modifications and equivalents of the subject matter recited in the claims appended hereto as permitted by applicable law. Moreover, any combination of the above-described elements in all possible variations thereof is encompassed by the invention unless otherwise indicated herein or otherwise clearly contradicted by context. Those skilled in the art will recognize, or be able to ascertain using no more than routine experimentation, many equivalents to the specific embodiments of the invention described herein. Such equivalents are intended to be encompassed by the following claims.

The application's sequence listing, which the Patent Office published only in electronic form, follows.

SEQUENCE LISTING (2287 sequences)

SEQ ID NO: 1 - protein, 8 aa, Artificial Sequence
  Synthetic
GFNIKDDY

SEQ ID NO: 2 - protein, 8 aa, Artificial Sequence
  Synthetic
IDPENGDT

SEQ ID NO: 3 - protein, 10 aa, Artificial Sequence
  Synthetic
TLWLRRGLDY

SEQ ID NO: 4 - protein, 11 aa, Artificial Sequence
  Synthetic
KSLLHSNGYTY

SEQ ID NO: 5 - protein, 3 aa, Artificial Sequence
  Synthetic
RMS

SEQ ID NO: 6 - protein, 9 aa, Artificial Sequence
  Synthetic
MQHLEYPFT

SEQ ID NO: 7 - protein, 5 aa, Artificial Sequence
  Synthetic
DDYMY

SEQ ID NO: 8 - protein, 17 aa, Artificial Sequence
  Synthetic
WIDPENGDTEYASKFQD

SEQ ID NO: 9 - protein, 8 aa, Artificial Sequence
  Synthetic
WLRRGLDY

SEQ ID NO: 10 - protein, 16 aa, Artificial Sequence
  Synthetic
RSSKSLLHSNGYTYLF

SEQ ID NO: 11 - protein, 7 aa, Artificial Sequence
  Synthetic
RMSNLAS

SEQ ID NO: 12 - protein, 7 aa, Artificial Sequence
  Synthetic
GFNIKDD

SEQ ID NO: 13 - protein, 3 aa, Artificial Sequence
  Synthetic
ENG

SEQ ID NO: 14 - protein, 6 aa, Artificial Sequence
  Synthetic
LRRGLD

SEQ ID NO: 15 - protein, 12 aa, Artificial Sequence
  Synthetic
SKSLLHSNGYTY

SEQ ID NO: 16 - protein, 6 aa, Artificial Sequence
  Synthetic
HLEYPF

SEQ ID NO: 17 - protein, 117 aa, Artificial Sequence
  Synthetic
EVQLQQSGAELVRPGASVKLSCTASGFNIKDDYMYWVKQRPEQGLEWIGWIDPENGDTEYASKFQDKATVTADTSSNTAYLQLSSLTSEDTAVYYCTLWLRRGLDYWGQGTSVTVSS

SEQ ID NO: 18 - protein, 112 aa, Artificial Sequence
  Synthetic
DIVMTQAAPSVPVTPGESVSISCRSSKSLLHSNGYTYLFWFLQRPGQSPQLLIYRMSNLASGVPDRFSGSGSGTAFTLRISRVEAEDVGVYYCMQHLEYPFTFGGGTKLEIK

SEQ ID NO: 19 - protein, 8 aa, Artificial Sequence
  Synthetic
IDPETGDT

SEQ ID NO: 20 - protein, 17 aa, Artificial Sequence
  Synthetic
WIDPETGDTEYASKFQD

SEQ ID NO: 21 - protein, 3 aa, Artificial Sequence
  Synthetic
ETG

SEQ ID NO: 22 - protein, 117 aa, Artificial Sequence
  Synthetic
EVQLQQSGAELVRPGASVKLSCTASGFNIKDDYMYWVKQRPEQGLEWIGWIDPETGDTEYASKFQDKATVTADTSSNTAYLQLSSLTSEDTAVYYCTLWLRRGLDYWGQGTSVTVSS

SEQ ID NO: 23 - protein, 8 aa, Artificial Sequence
  Synthetic
IDPESGDT

SEQ ID NO: 24 - protein, 17 aa, Artificial Sequence
  Synthetic
WIDPESGDTEYASKFQD

SEQ ID NO: 25 - protein, 3 aa, Artificial Sequence
  Synthetic
ESG

SEQ ID NO: 26 - protein, 117 aa, Artificial Sequence
  Synthetic
EVQLQQSGAELVRPGASVKLSCTASGFNIKDDYMYWVKQRPEQGLEWIGWIDPESGDTEYASKFQDKATVTADTSSNTAYLQLSSLTSEDTAVYYCTLWLRRGLDYWGQGTSVTVSS

SEQ ID NO: 27 - protein, 9 aa, Artificial Sequence
  Synthetic
GYSITSGYY

SEQ ID NO: 28 - protein, 7 aa, Artificial Sequence
  Synthetic
ITFDGAN

SEQ ID NO: 29 - protein, 12 aa, Artificial Sequence
  Synthetic
TRSSYDYDVLDY

SEQ ID NO: 30 - protein, 6 aa, Artificial Sequence
  Synthetic
QDISNF

SEQ ID NO: 31 - protein, 3 aa, Artificial Sequence
  Synthetic
YTS

SEQ ID NO: 32 - protein, 9 aa, Artificial Sequence
  Synthetic
QQGHTLPYT

SEQ ID NO: 33 - protein, 6 aa, Artificial Sequence
  Synthetic
SGYYWN

SEQ ID NO: 34 - protein, 16 aa, Artificial Sequence
  Synthetic
YITFDGANNYNPSLKN

SEQ ID NO: 35 - protein, 10 aa, Artificial Sequence
  Synthetic
SSYDYDVLDY

SEQ ID NO: 36 - protein, 11 aa, Artificial Sequence
  Synthetic
RASQDISNFLN

SEQ ID NO: 37 - protein, 7 aa, Artificial Sequence
  Synthetic
YTSRLHS

SEQ ID NO: 38 - protein, 8 aa, Artificial Sequence
  Synthetic
GYSITSGY

SEQ ID NO: 39 - protein, 3 aa, Artificial Sequence
  Synthetic
FDG

SEQ ID NO: 40 - protein, 8 aa, Artificial Sequence
  Synthetic
SYDYDVLD

SEQ ID NO: 41 - protein, 7 aa, Artificial Sequence
  Synthetic
SQDISNF

SEQ ID NO: 42 - protein, 6 aa, Artificial Sequence
  Synthetic
GHTLPY

SEQ ID NO: 43 - protein, 119 aa, Artificial Sequence
  Synthetic
DVQLQESGPGLVKPSQSLSLTCSVTGYSITSGYYWNWIRQFPGNKLEWMGYITFDGANNYNPSLKNRISITRDTSKNQFFLKLTSVTTEDTATYYCTRSSYDYDVLDYWGQGTTLTVSS

SEQ ID NO: 44 - protein, 107 aa, Artificial Sequence
  Synthetic
DIQMTQTTSSLSASLGDRVTISCRASQDISNFLNWYQQRPDGTVKLLIYYTSRLHSGVPSRFSGSGSGTDFSLTVSNLEQEDIATYFCQQGHTLPYTFGGGTKLEIK

SEQ ID NO: 45 - protein, 8 aa, Artificial Sequence
  Synthetic
GYSFTDYC

SEQ ID NO: 46 - protein, 8 aa, Artificial Sequence
  Synthetic
IYPGSGNT

SEQ ID NO: 47 - protein, 13 aa, Artificial Sequence
  Synthetic
AREDYYPYHGMDY

SEQ ID NO: 48 - protein, 10 aa, Artificial Sequence
  Synthetic
ESVDGYDNSF

SEQ ID NO: 49 - protein, 3 aa, Artificial Sequence
  Synthetic
RAS

SEQ ID NO: 50 - protein, 9 aa, Artificial Sequence
  Synthetic
QQSSEDPWT

SEQ ID NO: 51 - protein, 5 aa, Artificial Sequence
  Synthetic
DYCIN

SEQ ID NO: 52 - protein, 17 aa, Artificial Sequence
  Synthetic
WIYPGSGNTRYSERFKG

SEQ ID NO: 53 - protein, 11 aa, Artificial Sequence
  Synthetic
EDYYPYHGMDY

SEQ ID NO: 54 - protein, 15 aa, Artificial Sequence
  Synthetic
RASESVDGYDNSFMH

SEQ ID NO: 55 - protein, 7 aa, Artificial Sequence
  Synthetic
RASNLES

SEQ ID NO: 56 - protein, 7 aa, Artificial Sequence
  Synthetic
GYSFTDY

SEQ ID NO: 57 - protein, 3 aa, Artificial Sequence
  Synthetic
GSG

SEQ ID NO: 58 - protein, 9 aa, Artificial Sequence
  Synthetic
DYYPYHGMD

SEQ ID NO: 59 - protein, 11 aa, Artificial Sequence
  Synthetic
SESVDGYDNSF

SEQ ID NO: 60 - protein, 6 aa, Artificial Sequence
  Synthetic
SSEDPW

SEQ ID NO: 61 - protein, 120 aa, Artificial Sequence
  Synthetic
QIQLQQSGPELVRPGASVKISCKASGYSFTDYCINWVNQRPGQGLEWIGWIYPGSGNTRYSERFKGKATLTVDTSSNTAYMQLSSLTSEDSAVYFCAREDYYPYHGMDYWGQGTSVTVSS

SEQ ID NO: 62 - protein, 111 aa, Artificial Sequence
  Synthetic
DIVLTQSPTSLAVSLGQRATISCRASESVDGYDNSFMHWYQQKPGQPPKLLIFRASNLESGIPARFSGSGSRTDFTLTINPVEAADVATYYCQQSSEDPWTFGGGTKLEIK

SEQ ID NO: 63 - protein, 8 aa, Artificial Sequence
  Synthetic
GYSFTDYY

SEQ ID NO: 64 - protein, 5 aa, Artificial Sequence
  Synthetic
DYYIN

SEQ ID NO: 65 - protein, 120 aa, Artificial Sequence
  Synthetic
QIQLQQSGPELVRPGASVKISCKASGYSFTDYYINWVNQRPGQGLEWIGWIYPGSGNTRYSERFKGKATLTVDTSSNTAYMQLSSLTSEDSAVYFCAREDYYPYHGMDYWGQGTSVTVSS

SEQ ID NO: 66 - protein, 8 aa, Artificial Sequence
  Synthetic
GYSFTDYD

SEQ ID NO: 67 - protein, 5 aa, Artificial Sequence
  Synthetic
DYDIN

SEQ ID NO: 68 - protein, 120 aa, Artificial Sequence
  Synthetic
QIQLQQSGPELVRPGASVKISCKASGYSFTDYDINWVNQRPGQGLEWIGWIYPGSGNTRYSERFKGKATLTVDTSSNTAYMQLSSLTSEDSAVYFCAREDYYPYHGMDYWGQGTSVTVSS

SEQ ID NO: 69 - protein, 117 aa, Artificial Sequence
  Synthetic
EVQLVQSGSELKKPGASVKVSCTASGFNIKDDYMYWVRQPPGKGLEWIGWIDPETGDTEYASKFQDRVTVTADTSTNTAYMELSSLRSEDTAVYYCTLWLRRGLDYWGQGTLVTVSS

SEQ ID NO: 70 - protein, 112 aa, Artificial Sequence
  Synthetic
DIVMTQSPLSLPVTPGEPASISCRSSKSLLHSNGYTYLFWFQQRPGQSPRLLIYRMSNLASGVPDRFSGSGSGTDFTLKISRVEAEDVGVYYCMQHLEYPFTFGGGTKVEIK

SEQ ID NO: 71 - protein, 117 aa, Artificial Sequence
  Synthetic
EVQLVQSGSELKKPGASVKVSCTASGFNIKDDYMYWVRQPPGKGLEWIGWIDPESGDTEYASKFQDRVTVTADTSTNTAYMELSSLRSEDTAVYYCTLWLRRGLDYWGQGTLVTVSS

SEQ ID NO: 72 - protein, 117 aa, Artificial Sequence
  Synthetic
EVQLVQSGSELKKPGASVKVSCTASGFNIKDDYMYWVRQPPGKGLEWIGWIDPENGDTEYASKFQDRVTVTADTSTNTAYMELSSLRSEDTAVYYCTLWLRRGLDYWGQGTLVTVSS

SEQ ID NO: 73 - protein, 119 aa, Artificial Sequence
  Synthetic
QVQLQESGPGLVKPSQTLSLTCSVTGYSITSGYYWNWIRQPPGKGLEWMGYITFDGANNYNPSLKNRVSISRDTSKNQFSLKLSSVTAEDTATYYCTRSSYDYDVLDYWGQGTTVTVSS

SEQ ID NO: 74 - protein, 107 aa, Artificial Sequence
  Synthetic
DIQMTQSPSSLSASVGDRVTITCRASQDISNFLNWYQQKPGQPVKLLIYYTSRLHSGVPSRFSGSGSGTDFTLTISSLQPEDFATYFCQQGHTLPYTFGQGTKLEIK

SEQ ID NO: 75 - protein, 107 aa, Artificial Sequence
  Synthetic
DIQMTQSPSSLSASVGDRVTITCRASQDISNFLNWYQQKPGQPVKLLIYYTSRLHSGVPSRFSGSGSGTDFTLTISSLQPEDFATYYCQQGHTLPYTFGQGTKLEIK

SEQ ID NO: 76 - protein, 119 aa, Artificial Sequence
  Synthetic
QVQLQESGPGLVKPSQTLSLTCTVTGYSITSGYYWNWIRQPPGKGLEWIGYITFDGANNYNPSLKNRVSISRDTSKNQFSLKLSSVTAEDTATYYCTRSSYDYDVLDYWGQGTTVTVSS

SEQ ID NO: 77 - protein, 120 aa, Artificial Sequence
  Synthetic
QVQLVQSGAEVKKPGASVKVSCKASGYSFTDYYINWVRQAPGQGLEWMGWIYPGSGNTRYSERFKGRVTITRDTSASTAYMELSSLRSEDTAVYYCAREDYYPYHGMDYWGQGTLVTVSS

SEQ ID NO: 78 - protein, 111 aa, Artificial Sequence
  Synthetic
DIVLTQSPDSLAVSLGERATINCRASESVDGYDNSFMHWYQQKPGQPPKLLIFRASNLESGVPDRFSGSGSRTDFTLTISSLQAEDVAVYYCQQSSEDPWTFGQGTKLEIK

SEQ ID NO: 79 - protein, 120 aa, Artificial Sequence
  Synthetic
QVQLVQSGAEVKKPGASVKVSCKASGYSFTDYDINWVRQAPGQGLEWMGWIYPGSGNTRYSERFKGRVTITRDTSASTAYMELSSLRSEDTAVYYCAREDYYPYHGMDYWGQGTLVTVSS

SEQ ID NO: 80 - protein, 111 aa, Artificial Sequence
  Synthetic
DIVMTQSPDSLAVSLGERATINCRASESVDGYDNSFMHWYQQKPGQPPKLLIFRASNLESGVPDRFSGSGSGTDFTLTISSLQAEDVAVYYCQQSSEDPWTFGQGTKLEIK

SEQ ID NO: 81 - protein, 330 aa, Homo sapiens [sequence omitted]

SEQ ID NO: 82 - protein, 330 aa, Artificial Sequence
  Synthetic
ASTKGPSVFPLAPSSKSTSGGTAALGCLVKDYFPEPVTVSWNSGALTSGVHTFPAVLQSSGLYSLSSVVTVPSSSLGTQTYICNVNHKPSNTKVDKKVEPKSCDKTHTCPPCPAPEAAGGPSVFLFPPKPKDTLMISRTPEVTCVVVDVSHEDPEVKFNWYVDGVEVHNAKTKPREEQYNSTYRVVSVLTVLHQDWLNGKEYKCKVSNKALPAPIEKTISKAKGQPREPQVYTLPPSRDELTKNQVSLTCLVKGFYPSDIAVEWESNGQPENNYKTTPPVLDSDGSFFLYSKLTVDKSRWQQGNVFSCSVMHEALHNHYTQKSLSLSPGK

SEQ ID NO: 83 - protein, 107 aa, Artificial Sequence [sequence omitted]

SEQ ID NO: 84 - protein, 447 aa, Artificial Sequence
  Synthetic
EVQLVQSGSELKKPGASVKVSCTASGFNIKDDYMYWVRQPPGKGLEWIGWIDPETGDTEYASKFQDRVTVTADTSTNTAYMELSSLRSEDTAVYYCTLWLRRGLDYWGQGTLVTVSSASTKGPSVFPLAPSSKSTSGGTAALGCLVKDYFPEPVTVSWNSGALTSGVHTFPAVLQSSGLYSLSSVVTVPSSSLGTQTYICNVNHKPSNTKVDKKVEPKSCDKTHTCPPCPAPELLGGPSVFLFPPKPKDTLMISRTPEVTCVVVDVSHEDPEVKFNWYVDGVEVHNAKTKPREEQYNSTYRVVSVLTVLHQDWLNGKEYKCKVSNKALPAPIEKTISKAKGQPREPQVYTLPPSRDELTKNQVSLTCLVKGFYPSDIAVEWESNGQPENNYKTTPPVLDSDGSFFLYSKLTVDKSRWQQGNVFSCSVMHEALHNHYTQKSLSLSPGK

SEQ ID NO: 85 - protein, 219 aa, Artificial Sequence
  Synthetic
DIVMTQSPLSLPVTPGEPASISCRSSKSLLHSNGYTYLFWFQQRPGQSPRLLIYRMSNLASGVPDRFSGSGSGTDFTLKISRVEAEDVGVYYCMQHLEYPFTFGGGTKVEIKRTVAAPSVFIFPPSDEQLKSGTASVVCLLNNFYPREAKVQWKVDNALQSGNSQESVTEQDSKDSTYSLSSTLTLSKADYEKHKVYACEVTHQGLSSPVTKSFNRGEC

SEQ ID NO: 86 - protein, 447 aa, Artificial Sequence
  Synthetic
EVQLVQSGSELKKPGASVKVSCTASGFNIKDDYMYWVRQPPGKGLEWIGWIDPESGDTEYASKFQDRVTVTADTSTNTAYMELSSLRSEDTAVYYCTLWLRRGLDYWGQGTLVTVSSASTKGPSVFPLAPSSKSTSGGTAALGCLVKDYFPEPVTVSWNSGALTSGVHTFPAVLQSSGLYSLSSVVTVPSSSLGTQTYICNVNHKPSNTKVDKKVEPKSCDKTHTCPPCPAPELLGGPSVFLFPPKPKDTLMISRTPEVTCVVVDVSHEDPEVKFNWYVDGVEVHNAKTKPREEQYNSTYRVVSVLTVLHQDWLNGKEYKCKVSNKALPAPIEKTISKAKGQPREPQVYTLPPSRDELTKNQVSLTCLVKGFYPSDIAVEWESNGQPENNYKTTPPVLDSDGSFFLYSKLTVDKSRWQQGNVFSCSVMHEALHNHYTQKSLSLSPGK

SEQ ID NO: 87 - protein, 447 aa, Artificial Sequence
  Synthetic
EVQLVQSGSELKKPGASVKVSCTASGFNIKDDYMYWVRQPPGKGLEWIGWIDPENGDTEYASKFQDRVTVTADTSTNTAYMELSSLRSEDTAVYYCTLWLRRGLDYWGQGTLVTVSSASTKGPSVFPLAPSSKSTSGGTAALGCLVKDYFPEPVTVSWNSGALTSGVHTFPAVLQSSGLYSLSSVVTVPSSSLGTQTYICNVNHKPSNTKVDKKVEPKSCDKTHTCPPCPAPELLGGPSVFLFPPKPKDTLMISRTPEVTCVVVDVSHEDPEVKFNWYVDGVEVHNAKTKPREEQYNSTYRVVSVLTVLHQDWLNGKEYKCKVSNKALPAPIEKTISKAKGQPREPQVYTLPPSRDELTKNQVSLTCLVKGFYPSDIAVEWESNGQPENNYKTTPPVLDSDGSFFLYSKLTVDKSRWQQGNVFSCSVMHEALHNHYTQKSLSLSPGK

SEQ ID NO: 88 - protein, 449 aa, Artificial Sequence
  Synthetic
QVQLQESGPGLVKPSQTLSLTCSVTGYSITSGYYWNWIRQPPGKGLEWMGYITFDGANNYNPSLKNRVSISRDTSKNQFSLKLSSVTAEDTATYYCTRSSYDYDVLDYWGQGTTVTVSSASTKGPSVFPLAPSSKSTSGGTAALGCLVKDYFPEPVTVSWNSGALTSGVHTFPAVLQSSGLYSLSSVVTVPSSSLGTQTYICNVNHKPSNTKVDKKVEPKSCDKTHTCPPCPAPELLGGPSVFLFPPKPKDTLMISRTPEVTCVVVDVSHEDPEVKFNWYVDGVEVHNAKTKPREEQYNSTYRVVSVLTVLHQDWLNGKEYKCKVSNKALPAPIEKTISKAKGQPREPQVYTLPPSRDELTKNQVSLTCLVKGFYPSDIAVEWESNGQPENNYKTTPPVLDSDGSFFLYSKLTVDKSRWQQGNVFSCSVMHEALHNHYTQKSLSLSPGK

SEQ ID NO: 89 - protein, 214 aa, Artificial Sequence
  Synthetic
DIQMTQSPSSLSASVGDRVTITCRASQDISNFLNWYQQKPGQPVKLLIYYTSRLHSGVPSRFSGSGSGTDFTLTISSLQPEDFATYFCQQGHTLPYTFGQGTKLEIKRTVAAPSVFIFPPSDEQLKSGTASVVCLLNNFYPREAKVQWKVDNALQSGNSQESVTEQDSKDSTYSLSSTLTLSKADYEKHKVYACEVTHQGLSSPVTKSFNRGEC

SEQ ID NO: 90 - protein, 214 aa, Artificial Sequence
  Synthetic
DIQMTQSPSSLSASVGDRVTITCRASQDISNFLNWYQQKPGQPVKLLIYYTSRLHSGVPSRFSGSGSGTDFTLTISSLQPEDFATYYCQQGHTLPYTFGQGTKLEIKRTVAAPSVFIFPPSDEQLKSGTASVVCLLNNFYPREAKVQWKVDNALQSGNSQESVTEQDSKDSTYSLSSTLTLSKADYEKHKVYACEVTHQGLSSPVTKSFNRGEC

SEQ ID NO: 91 - protein, 449 aa, Artificial Sequence
  Synthetic
QVQLQESGPGLVKPSQTLSLTCTVTGYSITSGYYWNWIRQPPGKGLEWIGYITFDGANNYNPSLKNRVSISRDTSKNQFSLKLSSVTAEDTATYYCTRSSYDYDVLDYWGQGTTVTVSSASTKGPSVFPLAPSSKSTSGGTAALGCLVKDYFPEPVTVSWNSGALTSGVHTFPAVLQSSGLYSLSSVVTVPSSSLGTQTYICNVNHKPSNTKVDKKVEPKSCDKTHTCPPCPAPELLGGPSVFLFPPKPKDTLMISRTPEVTCVVVDVSHEDPEVKFNWYVDGVEVHNAKTKPREEQYNSTYRVVSVLTVLHQDWLNGKEYKCKVSNKALPAPIEKTISKAKGQPREPQVYTLPPSRDELTKNQVSLTCLVKGFYPSDIAVEWESNGQPENNYKTTPPVLDSDGSFFLYSKLTVDKSRWQQGNVFSCSVMHEALHNHYTQKSLSLSPGK

SEQ ID NO: 92 - protein, 450 aa, Artificial Sequence
  Synthetic
QVQLVQSGAEVKKPGASVKVSCKASGYSFTDYYINWVRQAPGQGLEWMGWIYPGSGNTRYSERFKGRVTITRDTSASTAYMELSSLRSEDTAVYYCAREDYYPYHGMDYWGQGTLVTVSSASTKGPSVFPLAPSSKSTSGGTAALGCLVKDYFPEPVTVSWNSGALTSGVHTFPAVLQSSGLYSLSSVVTVPSSSLGTQTYICNVNHKPSNTKVDKKVEPKSCDKTHTCPPCPAPELLGGPSVFLFPPKPKDTLMISRTPEVTCVVVDVSHEDPEVKFNWYVDGVEVHNAKTKPREEQYNSTYRVVSVLTVLHQDWLNGKEYKCKVSNKALPAPIEKTISKAKGQPREPQVYTLPPSRDELTKNQVSLTCLVKGFYPSDIAVEWESNGQPENNYKTTPPVLDSDGSFFLYSKLTVDKSRWQQGNVFSCSVMHEALHNHYTQKSLSLSPGK

SEQ ID NO: 93 - protein, 218 aa, Artificial Sequence
  Synthetic
DIVLTQSPDSLAVSLGERATINCRASESVDGYDNSFMHWYQQKPGQPPKLLIFRASNLESGVPDRFSGSGSRTDFTLTISSLQAEDVAVYYCQQSSEDPWTFGQGTKLEIKRTVAAPSVFIFPPSDEQLKSGTASVVCLLNNFYPREAKVQWKVDNALQSGNSQESVTEQDSKDSTYSLSSTLTLSKADYEKHKVYACEVTHQGLSSPVTKSFNRGEC

SEQ ID NO: 94 - protein, 450 aa, Artificial Sequence
  Synthetic
QVQLVQSGAEVKKPGASVKVSCKASGYSFTDYDINWVRQAPGQGLEWMGWIYPGSGNTRYSERFKGRVTITRDTSASTAYMELSSLRSEDTAVYYCAREDYYPYHGMDYWGQGTLVTVSSASTKGPSVFPLAPSSKSTSGGTAALGCLVKDYFPEPVTVSWNSGALTSGVHTFPAVLQSSGLYSLSSVVTVPSSSLGTQTYICNVNHKPSNTKVDKKVEPKSCDKTHTCPPCPAPELLGGPSVFLFPPKPKDTLMISRTPEVTCVVVDVSHEDPEVKFNWYVDGVEVHNAKTKPREEQYNSTYRVVSVLTVLHQDWLNGKEYKCKVSNKALPAPIEKTISKAKGQPREPQVYTLPPSRDELTKNQVSLTCLVKGFYPSDIAVEWESNGQPENNYKTTPPVLDSDGSFFLYSKLTVDKSRWQQGNVFSCSVMHEALHNHYTQKSLSLSPGK

SEQ ID NO: 95 - protein, 218 aa, Artificial Sequence
  Synthetic
DIVMTQSPDSLAVSLGERATINCRASESVDGYDNSFMHWYQQKPGQPPKLLIFRASNLESGVPDRFSGSGSGTDFTLTISSLQAEDVAVYYCQQSSEDPWTFGQGTKLEIKRTVAAPSVFIFPPSDEQLKSGTASVVCLLNNFYPREAKVQWKVDNALQSGNSQESVTEQDSKDSTYSLSSTLTLSKADYEKHKVYACEVTHQGLSSPVTKSFNRGEC

SEQ ID NO: 96 - protein, 108 aa, Artificial Sequence
  Synthetic
ASTKGPSVFPLAPSSKSTSGGTAALGCLVKDYFPEPVTVSWNSGALTSGVHTFPAVLQSSGLYSLSSVVTVPSSSLGTQTYICNVNHKPSNTKVDKKVEPKSCDKTHT

SEQ ID NO: 97 - protein, 225 aa, Artificial Sequence
  Synthetic
EVQLVQSGSELKKPGASVKVSCTASGFNIKDDYMYWVRQPPGKGLEWIGWIDPETGDTEYASKFQDRVTVTADTSTNTAYMELSSLRSEDTAVYYCTLWLRRGLDYWGQGTLVTVSSASTKGPSVFPLAPSSKSTSGGTAALGCLVKDYFPEPVTVSWNSGALTSGVHTFPAVLQSSGLYSLSSVVTVPSSSLGTQTYICNVNHKPSNTKVDKKVEPKSCDKTHT

SEQ ID NO: 98 - protein, 225 aa, Artificial Sequence
  Synthetic
EVQLVQSGSELKKPGASVKVSCTASGFNIKDDYMYWVRQPPGKGLEWIGWIDPESGDTEYASKFQDRVTVTADTSTNTAYMELSSLRSEDTAVYYCTLWLRRGLDYWGQGTLVTVSSASTKGPSVFPLAPSSKSTSGGTAALGCLVKDYFPEPVTVSWNSGALTSGVHTFPAVLQSSGLYSLSSVVTVPSSSLGTQTYICNVNHKPSNTKVDKKVEPKSCDKTHT

SEQ ID NO: 99 - protein, 225 aa, Artificial Sequence
  Synthetic
EVQLVQSGSELKKPGASVKVSCTASGFNIKDDYMYWVRQPPGKGLEWIGWIDPENGDTEYASKFQDRVTVTADTSTNTAYMELSSLRSEDTAVYYCTLWLRRGLDYWGQGTLVTVSSASTKGPSVFPLAPSSKSTSGGTAALGCLVKDYFPEPVTVSWNSGALTSGVHTFPAVLQSSGLYSLSSVVTVPSSSLGTQTYICNVNHKPSNTKVDKKVEPKSCDKTHT

SEQ ID NO: 100 - protein, 227 aa, Artificial Sequence
  Synthetic
QVQLQESGPGLVKPSQTLSLTCSVTGYSITSGYYWNWIRQPPGKGLEWMGYITFDGANNYNPSLKNRVSISRDTSKNQFSLKLSSVTAEDTATYYCTRSSYDYDVLDYWGQGTTVTVSSASTKGPSVFPLAPSSKSTSGGTAALGCLVKDYFPEPVTVSWNSGALTSGVHTFPAVLQSSGLYSLSSVVTVPSSSLGTQTYICNVNHKPSNTKVDKKVEPKSCDKTHT

SEQ ID NO: 101 - protein, 227 aa, Artificial Sequence
  Synthetic
QVQLQESGPGLVKPSQTLSLTCTVTGYSITSGYYWNWIRQPPGKGLEWIGYITFDGANNYNPSLKNRVSISRDTSKNQFSLKLSSVTAEDTATYYCTRSSYDYDVLDYWGQGTTVTVSSASTKGPSVFPLAPSSKSTSGGTAALGCLVKDYFPEPVTVSWNSGALTSGVHTFPAVLQSSGLYSLSSVVTVPSSSLGTQTYICNVNHKPSNTKVDKKVEPKSCDKTHT

SEQ ID NO: 102 - protein, 228 aa, Artificial Sequence
  Synthetic
QVQLVQSGAEVKKPGASVKVSCKASGYSFTDYYINWVRQAPGQGLEWMGWIYPGSGNTRYSERFKGRVTITRDTSASTAYMELSSLRSEDTAVYYCAREDYYPYHGMDYWGQGTLVTVSSASTKGPSVFPLAPSSKSTSGGTAALGCLVKDYFPEPVTVSWNSGALTSGVHTFPAVLQSSGLYSLSSVVTVPSSSLGTQTYICNVNHKPSNTKVDKKVEPKSCDKTHT

SEQ ID NO: 103 - protein, 228 aa, Artificial Sequence
  Synthetic
QVQLVQSGAEVKKPGASVKVSCKASGYSFTDYDINWVRQAPGQGLEWMGWIYPGSGNTRYSERFKGRVTITRDTSASTAYMELSSLRSEDTAVYYCAREDYYPYHGMDYWGQGTLVTVSSASTKGPSVFPLAPSSKSTSGGTAALGCLVKDYFPEPVTVSWNSGALTSGVHTFPAVLQSSGLYSLSSVVTVPSSSLGTQTYICNVNHKPSNTKVDKKVEPKSCDKTHT

SEQ ID NO: 104 - protein, 19 aa, Artificial Sequence
  Synthetic
MGWSCIILFLVATATGVHS

SEQ ID NO: 105 - protein, 760 aa, homo sapiens
MMDQARSAFSNLFGGEPLSYTRFSLARQVDGDNSHVEMKLAVDEEENADNNTKANVTKPKRCSGSICYGTIAVIVFFLIGFMIGYLGYCKGVEPKTECERLAGTESPVREEPGEDFPAARRLYWDDLKRKLSEKLDSTDFTGTIKLLNENSYVPREAGSQKDENLALYVENQFREFKLSKVWRDQHFVKIQVKDSAQNSVIIVDKNGRLVYLVENPGGYVAYSKAATVTGKLVHANFGTKKDFEDLYTPVNGSIVIVRAGKITFAEKVANAESLNAIGVLIYMDQTKFPIVNAELSFFGHAHLGTGDPYTPGFPSFNHTQFPPSRSSGLPNIPVQTISRAAAEKLFGNMEGDCPSDWKTDSTCRMVTSESKNVKLTVSNVLKEIKILNIFGVIKGFVEPDHYVVVGAQRDAWGPGAAKSGVGTALLLKLAQMFSDMVLKDGFQPSRSIIFASWSAGDFGSVGATEWLEGYLSSLHLKAFTYINLDKAVLGTSNFKVSASPLLYTLIEKTMQNVKHPVTGQFLYQDSNWASKVEKLTLDNAAFPFLAYSGIPAVSFCFCEDTDYPYLGTTMDTYKELIERIPELNKVARAAAEVAGQFVIKLTHDVELNLDYERYNSQLLSFVRDLNQYRADIKEMGLSLQWLYSARGDFFRATSRLTTDFGNAEKTDRFVMKKLNDRVMRVEYHFLSPYVSPKESPFRHVFWGSGSHTLPALLENLKLRKQNNGAFNETLFRNQLALATWTIQGAANALSGDVWDIDNEF

SEQ ID NO: 106 - protein, 760 aa, Macaca mulatta
MMDQARSAFSNLFGGEPLSYTRFSLARQVDGDNSHVEMKLGVDEEENTDNNTKPNGTKPKRCGGNICYGTIAVIIFFLIGFMIGYLGYCKGVEPKTECERLAGTESPAREEPEEDFPAAPRLYWDDLKRKLSEKLDTTDFTSTIKLLNENLYVPREAGSQKDENLALYIENQFREFKLSKVWRDQHFVKIQVKDSAQNSVIIVDKNGGLVYLVENPGGYVAYSKAATVTGKLVHANFGTKKDFEDLDSPVNGSIVIVRAGKITFAEKVANAESLNAIGVLIYMDQTKFPIVKADLSFFGHAHLGTGDPYTPGFPSFNHTQFPPSQSSGLPNIPVQTISRAAAEKLFGNMEGDCPSDWKTDSTCKMVTSENKSVKLTVSNVLKETKILNIFGVIKGFVEPDHYVVVGAQRDAWGPGAAKSSVGTALLLKLAQMFSDMVLKDGFQPSRSIIFASWSAGDFGSVGATEWLEGYLSSLHLKAFTYINLDKAVLGTSNFKVSASPLLYTLIEKTMQDVKHPVTGRSLYQDSNWASKVEKLTLDNAAFPFLAYSGIPAVSFCFCEDTDYPYLGTTMDTYKELVERIPELNKVARAAAEVAGQFVIKLTHDTELNLDYERYNSQLLLFLRDLNQYRADVKEMGLSLQWLYSARGDFFRATSRLTTDFRNAEKRDKFVMKKLNDRVMRVEYYFLSPYVSPKESPFRHVFWGSGSHTLSALLESLKLRRQNNSAFNETLFRNQLALATWTIQGAANALSGDVWDIDNEF

SEQ ID NO: 107 - protein, 760 aa, Macaca fascicularis
MMDQARSAFSNLFGGEPLSYTRFSLARQVDGDNSHVEMKLGVDEEENTDNNTKANGTKPKRCGGNICYGTIAVIIFFLIGFMIGYLGYCKGVEPKTECERLAGTESPAREEPEEDFPAAPRLYWDDLKRKLSEKLDTTDFTSTIKLLNENLYVPREAGSQKDENLALYIENQFREFKLSKVWRDQHFVKIQVKDSAQNSVIIVDKNGGLVYLVENPGGYVAYSKAATVTGKLVHANFGTKKDFEDLDSPVNGSIVIVRAGKITFAEKVANAESLNAIGVLIYMDQTKFPIVKADLSFFGHAHLGTGDPYTPGFPSFNHTQFPPSQSSGLPNIPVQTISRAAAEKLFGNMEGDCPSDWKTDSTCKMVTSENKSVKLTVSNVLKETKILNIFGVIKGFVEPDHYVVVGAQRDAWGPGAAKSSVGTALLLKLAQMFSDMVLKDGFQPSRSIIFASWSAGDFGSVGATEWLEGYLSSLHLKAFTYINLDKAVLGTSNFKVSASPLLYTLIEKTMQDVKHPVTGRSLYQDSNWASKVEKLTLDNAAFPFLAYSGIPAVSFCFCEDTDYPYLGTTMDTYKELVERIPELNKVARAAAEVAGQFVIKLTHDTELNLDYERYNSQLLLFLRDLNQYRADVKEMGLSLQWLYSARGDFFRATSRLTTDFRNAEKRDKFVMKKLNDRVMRVEYYFLSPYVSPKESPFRHVFWGSGSHTLSALLESLKLRRQNNSAFNETLFRNQLALATWTIQGAANALSGDVWDIDNEF

SEQ ID NO: 108 - protein, 763 aa, mus musculus
MMDQARSAFSNLFGGEPLSYTRFSLARQVDGDNSHVEMKLAADEEENADNNMKASVRKPKRFNGRLCFAAIALVIFFLIGFMSGYLGYCKRVEQKEECVKLAETEETDKSETMETEDVPTSSRLYWADLKTLLSEKLNSIEFADTIKQLSQNTYTPREAGSQKDESLAYYIENQFHEFKFSKVWRDEHYVKIQVKSSIGQNMVTIVQSNGNLDPVESPEGYVAFSKPTEVSGKLVHANFGTKKDFEELSYSVNGSLVIVRAGEITFAEKVANAQSFNAIGVLIYMDKNKFPVVEADLALFGHAHLGTGDPYTPGFPSFNHTQFPPSQSSGLPNIPVQTISRAAAEKLFGKMEGSCPARWNIDSSCKLELSQNQNVKLIVKNVLKERRILNIFGVIKGYEEPDRYVVVGAQRDALGAGVAAKSSVGTGLLLKLAQVFSDMISKDGFRPSRSIIFASWTAGDFGAVGATEWLEGYLSSLHLKAFTYINLDKVVLGTSNFKVSASPLLYTLMGKIMQDVKHPVDGKSLYRDSNWISKVEKLSFDNAAYPFLAYSGIPAVSFCFCEDADYPYLGTRLDTYEALTQKVPQLNQMVRTAAEVAGQLIIKLTHDVELNLDYEMYNSKLLSFMKDLNQFKTDIRDMGLSLQWLYSARGDYFRATSRLTTDFHNAEKTNRFVMREINDRIMKVEYHFLSPYVSPRESPFRHIFWGSGSHTLSALVENLKLRQKNITAFNETLFRNQLALATWTIQGVANALSGDIWNIDNEF

SEQ ID NO: 109 - protein, 197 aa, Artificial Sequence
  Synthetic
FVKIQVKDSAQNSVIIVDKNGRLVYLVENPGGYVAYSKAATVTGKLVHANFGTKKDFEDLYTPVNGSIVIVRAGKITFAEKVANAESLNAIGVLIYMDQTKFPIVNAELSFFGHAHLGTGDPYTPGFPSFNHTQFPPSRSSGLPNIPVQTISRAAAEKLFGNMEGDCPSDWKTDSTCRMVTSESKNVKLTVSNVLKE

SEQ ID NO: 110 - protein, 5 aa, Artificial Sequence
  Synthetic
SYWMH

SEQ ID NO: 111 - protein, 17 aa, Artificial Sequence
  Synthetic
EINPTNGRTNYIEKFKS

SEQ ID NO: 112 - protein, 7 aa, Artificial Sequence
  Synthetic
GTRAYHY

SEQ ID NO: 113 - protein, 11 aa, Artificial Sequence
  Synthetic
RASDNLYSNLA

SEQ ID NO: 114 - protein, 7 aa, Artificial Sequence
  Synthetic
DATNLAD

SEQ ID NO: 115 - protein, 9 aa, Artificial Sequence
  Synthetic
QHFWGTPLT

SEQ ID NO: 116 - protein, 7 aa, Artificial Sequence
  Synthetic
GYTFTSY

SEQ ID NO: 117 - protein, 6 aa, Artificial Sequence
  Synthetic
NPTNGR

SEQ ID NO: 118 - protein, 6 aa, Artificial Sequence
  Synthetic
TSYWMH

SEQ ID NO: 119 - protein, 13 aa, Artificial Sequence
  Synthetic
WIGEINPTNGRTN

SEQ ID NO: 120 - protein, 6 aa, Artificial Sequence
  Synthetic
ARGTRA

SEQ ID NO: 121 - protein, 7 aa, Artificial Sequence
  Synthetic
YSNLAWY

SEQ ID NO: 122 - protein, 10 aa, Artificial Sequence
  Synthetic
LLVYDATNLA

SEQ ID NO: 123 - protein, 8 aa, Artificial Sequence
  Synthetic
QHFWGTPL

SEQ ID NO: 124 - protein, 116 aa, Artificial Sequence
  Synthetic
QVQLQQPGAELVKPGASVKLSCKASGYTFTSYWMHWVKQRPGQGLEWIGEINPTNGRTNYIEKFKSKATLTVDKSSSTAYMQLSSLTSEDSAVYYCARGTRAYHYWGQGTSVTVSS

SEQ ID NO: 125 - protein, 107 aa, Artificial Sequence
  Synthetic
DIQMTQSPASLSVSVGETVTITCRASDNLYSNLAWYQQKQGKSPQLLVYDATNLADGVPSRFSGSGSGTQYSLKINSLQSEDFGTYYCQHFWGTPLTFGAGTKLELK

SEQ ID NO: 126 - protein, 9 aa, Artificial Sequence
  Synthetic
QHFAGTPLT

SEQ ID NO: 127 - protein, 8 aa, Artificial Sequence
  Synthetic
QHFAGTPL

SEQ ID NO: 128 - protein, 116 aa, Artificial Sequence
  Synthetic
EVQLVQSGAEVKKPGASVKVSCKASGYTFTSYWMHWVRQAPGQRLEWIGEINPTNGRTNYIEKFKSRATLTVDKSASTAYMELSSLRSEDTAVYYCARGTRAYHYWGQGTMVTVSS

SEQ ID NO: 129 - protein, 107 aa, Artificial Sequence
  Synthetic
DIQMTQSPSSLSASVGDRVTITCRASDNLYSNLAWYQQKPGKSPKLLVYDATNLADGVPSRFSGSGSGTDYTLTISSLQPEDFATYYCQHFWGTPLTFGQGTKVEIK

SEQ ID NO: 130 - protein, 330 aa, Homo sapiens [sequence omitted]

SEQ ID NO: 131 - RNA, 18 nt, Artificial Sequence
  Synthetic
gagucuucuaggagccuu

SEQ ID NO: 132 - protein, 446 aa, Artificial Sequence
  Synthetic
QVQLQQPGAELVKPGASVKLSCKASGYTFTSYWMHWVKQRPGQGLEWIGEINPTNGRTNYIEKFKSKATLTVDKSSSTAYMQLSSLTSEDSAVYYCARGTRAYHYWGQGTSVTVSSASTKGPSVFPLAPSSKSTSGGTAALGCLVKDYFPEPVTVSWNSGALTSGVHTFPAVLQSSGLYSLSSVVTVPSSSLGTQTYICNVNHKPSNTKVDKKVEPKSCDKTHTCPPCPAPELLGGPSVFLFPPKPKDTLMISRTPEVTCVVVDVSHEDPEVKFNWYVDGVEVHNAKTKPREEQYNSTYRVVSVLTVLHQDWLNGKEYKCKVSNKALPAPIEKTISKAKGQPREPQVYTLPPSRDELTKNQVSLTCLVKGFYPSDIAVEWESNGQPENNYKTTPPVLDSDGSFFLYSKLTVDKSRWQQGNVFSCSVMHEALHNHYTQKSLSLSPGK

SEQ ID NO: 133 - protein, 214 aa, Artificial Sequence
  Synthetic
DIQMTQSPASLSVSVGETVTITCRASDNLYSNLAWYQQKQGKSPQLLVYDATNLADGVPSRFSGSGSGTQYSLKINSLQSEDFGTYYCQHFWGTPLTFGAGTKLELKRTVAAPSVFIFPPSDEQLKSGTASVVCLLNNFYPREAKVQWKVDNALQSGNSQESVTEQDSKDSTYSLSSTLTLSKADYEKHKVYACEVTHQGLSSPVTKSFNRGEC

SEQ ID NO: 134 - protein, 446 aa, Artificial Sequence
  Synthetic
EVQLVQSGAEVKKPGASVKVSCKASGYTFTSYWMHWVRQAPGQRLEWIGEINPTNGRTNYIEKFKSRATLTVDKSASTAYMELSSLRSEDTAVYYCARGTRAYHYWGQGTMVTVSSASTKGPSVFPLAPSSKSTSGGTAALGCLVKDYFPEPVTVSWNSGALTSGVHTFPAVLQSSGLYSLSSVVTVPSSSLGTQTYICNVNHKPSNTKVDKKVEPKSCDKTHTCPPCPAPELLGGPSVFLFPPKPKDTLMISRTPEVTCVVVDVSHEDPEVKFNWYVDGVEVHNAKTKPREEQYNSTYRVVSVLTVLHQDWLNGKEYKCKVSNKALPAPIEKTISKAKGQPREPQVYTLPPSRDELTKNQVSLTCLVKGFYPSDIAVEWESNGQPENNYKTTPPVLDSDGSFFLYSKLTVDKSRWQQGNVFSCSVMHEALHNHYTQKSLSLSPGK

SEQ ID NO: 135 - protein, 214 aa, Artificial Sequence
  Synthetic
DIQMTQSPSSLSASVGDRVTITCRASDNLYSNLAWYQQKPGKSPKLLVYDATNLADGVPSRFSGSGSGTDYTLTISSLQPEDFATYYCQHFWGTPLTFGQGTKVEIKRTVAAPSVFIFPPSDEQLKSGTASVVCLLNNFYPREAKVQWKVDNALQSGNSQESVTEQDSKDSTYSLSSTLTLSKADYEKHKVYACEVTHQGLSSPVTKSFNRGEC

SEQ ID NO: 136 - protein, 226 aa, Artificial Sequence
  Synthetic
QVQLQQPGAELVKPGASVKLSCKASGYTFTSYWMHWVKQRPGQGLEWIGEINPTNGRTNYIEKFKSKATLTVDKSSSTAYMQLSSLTSEDSAVYYCARGTRAYHYWGQGTSVTVSSASTKGPSVFPLAPSSKSTSGGTAALGCLVKDYFPEPVTVSWNSGALTSGVHTFPAVLQSSGLYSLSSVVTVPSSSLGTQTYICNVNHKPSNTKVDKKVEPKSCDKTHTCP

SEQ ID NO: 137 - protein, 226 aa, Artificial Sequence
  Synthetic
EVQLVQSGAEVKKPGASVKVSCKASGYTFTSYWMHWVRQAPGQRLEWIGEINPTNGRTNYIEKFKSRATLTVDKSASTAYMELSSLRSEDTAVYYCARGTRAYHYWGQGTMVTVSSASTKGPSVFPLAPSSKSTSGGTAALGCLVKDYFPEPVTVSWNSGALTSGVHTFPAVLQSSGLYSLSSVVTVPSSSLGTQTYICNVNHKPSNTKVDKKVEPKSCDKTHTCP

SEQ ID NO: 138 - protein, 7 aa, Artificial Sequence
  Synthetic
ASSLNIA

SEQ ID NO: 139 - protein, 12 aa, Artificial Sequence
  Synthetic
SKTFNTHPQSTP

SEQ ID NO: 140 - protein, 12 aa, Artificial Sequence
  Synthetic
TARGEHKEEELI

SEQ ID NO: 141 - protein, 9 aa, Artificial Sequence
  Synthetic
CQAQGQLVC

SEQ ID NO: 142 - protein, 9 aa, Artificial Sequence
  Synthetic
CSERSMNFC

SEQ ID NO: 143 - protein, 9 aa, Artificial Sequence
  Synthetic
CPKTRRVPC

SEQ ID NO: 144 - protein, 20 aa, Artificial Sequence
  Synthetic
WLSEAGPVVTVRALRGTGSW

SEQ ID NO: 145 - protein, 9 aa, Artificial Sequence
  Synthetic
CMQHSMRVC

SEQ ID NO: 146 - protein, 7 aa, Artificial Sequence
  Synthetic
DDTRHWG

SEQ ID NO: 147 - RNA, 21 nt, Artificial Sequence
  Synthetic
uccuaugacuguagauuuuau

SEQ ID NO: 148 - RNA, 23 nt, Artificial Sequence
  Synthetic
auaaaaucuacagucauaggaau

SEQ ID NO: 149 - RNA, 21 nt, Artificial Sequence
  Synthetic
uguaauaaccauaucuaccuu

SEQ ID NO: 150 - RNA, 23 nt, Artificial Sequence
  Synthetic
aagguagauaugguuauuacaaa

SEQ ID NO: 151 - RNA, 19 nt, Artificial Sequence
  Synthetic
cuuccuggauggcuucaau

SEQ ID NO: 152 - RNA, 19 nt, Artificial Sequence
  Synthetic
guacauuaagauggacuuc

SEQ ID NO: 153 - RNA, 30 nt, Artificial Sequence
  Synthetic
uaucuggauaggugguaucaagaucuguaa

SEQ ID NO: 154 - RNA, 25 nt, Artificial Sequence
  Synthetic
auguaacugaaaauguucuucuuua

SEQ ID NO: 155 - RNA, 30 nt, Artificial Sequence
  Synthetic
uggauaggugguaucaacaucuguaagcac

SEQ ID NO: 156 - RNA, 22 nt, Artificial Sequence
  Synthetic
gauaggugguaucaacaucugu

SEQ ID NO: 157 - RNA, 30 nt, Artificial Sequence
  Synthetic
uaucuggauaggugguaucaacaucuguaa

SEQ ID NO: 158 - RNA, 25 nt, Artificial Sequence
  Synthetic
aaacuuggaagagugaugugaugua

SEQ ID NO: 159 - RNA, 27 nt, Artificial Sequence
  Synthetic
gcucacuuguugaggcaaaacuuggaa

SEQ ID NO: 160 - RNA, 25 nt, Artificial Sequence
  Synthetic
gccuuggcaacauuuccacuuccug

SEQ ID NO: 161 - RNA, 25 nt, Artificial Sequence
  Synthetic
uacacacuuuaccuguugagaauag

SEQ ID NO: 162 - RNA, 24 nt, Artificial Sequence
  Synthetic
gauaggugguaucaacaucuguaa

SEQ ID NO: 163 - RNA, 21 nt, Artificial Sequence
  Synthetic
gauaggugguaucaacaucug

SEQ ID NO: 164 - RNA, 25 nt, Artificial Sequence
  Synthetic
gauaggugguaucaacaucuguaag

SEQ ID NO: 165 - RNA, 20 nt, Artificial Sequence
  Synthetic
ggugguaucaacaucuguaa

SEQ ID NO: 166 - RNA, 20 nt, Artificial Sequence
  Synthetic
guaucaacaucuguaagcac

SEQ ID NO: 167 - RNA, 30 nt, Artificial Sequence
  Synthetic
  misc_feature (27)..(27): n is a, c, g, or u
cggcuaauuucagagggcgcuuucuungac

SEQ ID NO: 168 - RNA, 26 nt, Artificial Sequence
  Synthetic
acaguggugcugagauaguauaggcc

SEQ ID NO: 169 - RNA, 22 nt, Artificial Sequence
  Synthetic
uaggccacuuuguugcucuugc

SEQ ID NO: 170 - RNA, 19 nt, Artificial Sequence
  Synthetic
uucagagggcgcuuucuuc

SEQ ID NO: 171 - RNA, 25 nt, Artificial Sequence
  Synthetic
ggccaaaccucggcuuaccugaaau

SEQ ID NO: 172 - RNA, 20 nt, Artificial Sequence
  Synthetic
ggccaaaccucggcuuaccu

SEQ ID NO: 173 - RNA, 30 nt, Artificial Sequence
  Synthetic
ucuucaggugcaccuucuguuucucaaucu

SEQ ID NO: 174 - RNA, 30 nt, Artificial Sequence
  Synthetic
ucugugauacucuucaggugcaccuucugu

SEQ ID NO: 175 - RNA, 21 nt, Artificial Sequence
  Synthetic
ucuucugcucgggaggugaca

SEQ ID NO: 176 - RNA, 20 nt, Artificial Sequence
  Synthetic
ccaguuacuauucagaagac

SEQ ID NO: 177 - RNA, 20 nt, Artificial Sequence
  Synthetic
ucuucaggugcaccuucugu

SEQ ID NO: 178 - RNA, 18 nt, Artificial Sequence
  Synthetic
ugcugcugucuucuugcu

SEQ ID NO: 179 - RNA, 19 nt, Artificial Sequence
  Synthetic
uuguuaacuuuuucccauu

SEQ ID NO: 180 - RNA, 20 nt, Artificial Sequence
  Synthetic
uguuaacuuuuucccauugg

SEQ ID NO: 181 - RNA, 20 nt, Artificial Sequence
  Synthetic
cauuuuguuaacuuuuuccc

SEQ ID NO: 182 - RNA, 19 nt, Artificial Sequence
  Synthetic
cuguagcuucacccuuucc

SEQ ID NO: 183 - RNA, 26 nt, Artificial Sequence
  Synthetic
gagagcuuccuguagcuucacccuuu

SEQ ID NO: 184 - RNA, 28 nt, Artificial Sequence
  Synthetic
uccuguagcuucacccuuuccacaggcg

SEQ ID NO: 185 - RNA, 20 nt, Artificial Sequence
  Synthetic
uguguuaccuacccuugucg

SEQ ID NO: 186 - RNA, 27 nt, Artificial Sequence
  Synthetic
uagacuaucuuuuauauucuguaauau

SEQ ID NO: 187 - RNA, 29 nt, Artificial Sequence
  Synthetic
gagagcuuccuguagcuucacccuuucca

SEQ ID NO: 188 - RNA, 31 nt, Artificial Sequence
  Synthetic
uuccuguagcuucacccuuuccacaggcguu

SEQ ID NO: 189 - RNA, 23 nt, Artificial Sequence
  Synthetic
agcuuccuguagcuucacccuuu

SEQ ID NO: 190 - RNA, 29 nt, Artificial Sequence
  Synthetic
ggagagagcuuccuguagcuucacccuuu

SEQ ID NO: 191 - RNA, 23 nt, Artificial Sequence
  Synthetic
gagagcuuccuguagcuucaccc

SEQ ID NO: 192 - RNA, 25 nt, Artificial Sequence
  Synthetic
uauguguuaccuacccuugucgguc

SEQ ID NO: 193 - RNA, 20 nt, Artificial Sequence
  Synthetic
ggagagagcuuccuguagcu

SEQ ID NO: 194 - RNA, 23 nt, Artificial Sequence
  Synthetic
ucacccuuuccacaggcguugca

SEQ ID NO: 195 - RNA, 28 nt, Artificial Sequence
  Synthetic
gcugggagagagcuuccuguagcuucac

SEQ ID NO: 196 - RNA, 28 nt, Artificial Sequence
  Synthetic
uguuaccuacccuugucgguccuuguac

SEQ ID NO: 197 - RNA, 28 nt, Artificial Sequence
  Synthetic
cugcugucuucuugcuaugaauaauguc

SEQ ID NO: 198 - RNA, 28 nt, Artificial Sequence
  Synthetic
ggcguugcacuuugcaaugcugcugucu

SEQ ID NO: 199 - RNA, 28 nt, Artificial Sequence
  Synthetic
uuggaaaucaagcugggagagagcuucc

SEQ ID NO: 200 - RNA, 28 nt, Artificial Sequence
  Synthetic
cuacccuugucgguccuuguacauuuug

SEQ ID NO: 201 - RNA, 28 nt, Artificial Sequence
  Synthetic
gucaauccgaccugagcuuuguuguaga

SEQ ID NO: 202 - RNA, 27 nt, Artificial Sequence
  Synthetic
cuugcuaugaauaaugucaauccgacc

SEQ ID NO: 203 - RNA, 28 nt, Artificial Sequence
  Synthetic
uauauguguuaccuacccuugucggucc

SEQ ID NO: 204 - RNA, 29 nt, Artificial Sequence
  Synthetic
aaucagcugggagagagcuuccuguagcu

SEQ ID NO: 205 - RNA, 26 nt, Artificial Sequence
  Synthetic
ucguucuucugucgucguaacguuuc

SEQ ID NO: 206 - RNA, 20 nt, Artificial Sequence
  Synthetic
uuugugucuuucugagaaac

SEQ ID NO: 207 - RNA, 20 nt, Artificial Sequence
  Synthetic
aaagacuuaccuuaagauac

SEQ ID NO: 208 - RNA, 20 nt, Artificial Sequence
  Synthetic
aucugucaaaucgccugcag

SEQ ID NO: 209 - RNA, 19 nt, Artificial Sequence
  Synthetic
cgccgccauuucucaacag

SEQ ID NO: 210 - RNA, 20 nt, Artificial Sequence
  Synthetic
uuuguauuuagcauguuccc

SEQ ID NO: 211 - RNA, 17 nt, Artificial Sequence
  Synthetic
ccgccauuucucaacag

SEQ ID NO: 212 - RNA, 21 nt, Artificial Sequence
  Synthetic
uucucaggaauuugugucuuu

SEQ ID NO: 213 - RNA, 11 nt, Artificial Sequence
  Synthetic
gacaacucuuu

SEQ ID NO: 214 - RNA, 20 nt, Artificial Sequence
  Synthetic
ucagcuucuguuagccacug

SEQ ID NO: 215 - RNA, 24 nt, Artificial Sequence
  Synthetic
uguucagcuucuguuagccacuga

SEQ ID NO: 216 - RNA, 27 nt, Artificial Sequence
  Synthetic
cuguucagcuucuguuagccacugauu

SEQ ID NO: 217 - RNA, 30 nt, Artificial Sequence
  Synthetic
uucucaacagaucugucaaaucgccugcag

SEQ ID NO: 218 - RNA, 25 nt, Artificial Sequence
  Synthetic
gccacugauuaaauaucuuuauauc

SEQ ID NO: 219 - RNA, 30 nt, Artificial Sequence
  Synthetic
ucuguuagccacugauuaaauaucuuuaua

SEQ ID NO: 220 - RNA, 31 nt, Artificial Sequence
  Synthetic
gagaaacuguucagcuucuguuagccacuga

SEQ ID NO: 221 - RNA, 31 nt, Artificial Sequence
  Synthetic
ucuuucugagaaacuguucagcuucuguuag

SEQ ID NO: 222 - RNA, 26 nt, Artificial Sequence
  Synthetic
cagaucugucaaaucgccugcaggua

SEQ ID NO: 223 - RNA, 26 nt, Artificial Sequence
  Synthetic
caacagaucugucaaaucgccugcag

SEQ ID NO: 224 - RNA, 33 nt, Artificial Sequence
  Synthetic
aaacuguucagcuucuguuagccacugauuaaa

SEQ ID NO: 225 - RNA, 31 nt, Artificial Sequence
  Synthetic
gaaacuguucagcuucuguuagccacugauu

SEQ ID NO: 226 - RNA, 28 nt, Artificial Sequence
  Synthetic
aaacuguucagcuucuguuagccacuga

SEQ ID NO: 227 - RNA, 28 nt, Artificial Sequence
  Synthetic
ugagaaacuguucagcuucuguuagcca

SEQ ID NO: 228 - RNA, 32 nt, Artificial Sequence
  Synthetic
uucugagaaacuguucagcuucuguuagccac

SEQ ID NO: 229 - RNA, 26 nt, Artificial Sequence
  Synthetic
uucugagaaacuguucagcuucuguu

SEQ ID NO: 230 - RNA, 25 nt, Artificial Sequence
  Synthetic
gaucugucaaaucgccugcagguaa

SEQ ID NO: 231 - RNA, 25 nt, Artificial Sequence
  Synthetic
auaaugaaaacgccgccauuucuca

SEQ ID NO: 232 - RNA, 25 nt, Artificial Sequence
  Synthetic
aaacuguucagcuucuguuagccac

SEQ ID NO: 233 - RNA, 25 nt, Artificial Sequence
  Synthetic
uugugucuuucugagaaacuguuca

SEQ ID NO: 234 - RNA, 25 nt, Artificial Sequence
  Synthetic
ccaauucucaggaauuugugucuuu

SEQ ID NO: 235 - RNA, 25 nt, Artificial Sequence
  Synthetic
aucgccugcagguaaaagcauaugg

SEQ ID NO: 236 - RNA, 30 nt, Artificial Sequence
  Synthetic
ugaaaacgccgccauuucucaacagaucug

SEQ ID NO: 237 - RNA, 30 nt, Artificial Sequence
  Synthetic
cauaaugaaaacgccgccauuucucaacag

SEQ ID NO: 238 - RNA, 30 nt, Artificial Sequence
  Synthetic
uguucagcuucuguuagccacugauuaaau

SEQ ID NO: 239 - RNA, 24 nt, Artificial Sequence
  Synthetic
cagaucugucaaaucgccugcagg

SEQ ID NO: 240 - RNA, 27 nt, Artificial Sequence
  Synthetic
caacagaucugucaaaucgccugcagg

SEQ ID NO: 241 - RNA, 29 nt, Artificial Sequence
  Synthetic
cucaacagaucugucaaaucgccugcagg

SEQ ID NO: 242 - RNA, 23 nt, Artificial Sequence
  Synthetic
gaucugucaaaucgccugcaggu

SEQ ID NO: 243 - RNA, 22 nt, Artificial Sequence
  Synthetic
gaucugucaaaucgccugcagg

SEQ ID NO: 244 - RNA, 21 nt, Artificial Sequence
  Synthetic
gaucugucaaaucgccugcag

SEQ ID NO: 245 - RNA, 25 nt, Artificial Sequence
  Synthetic
cagaucugucaaaucgccugcaggu

SEQ ID NO: 246 - RNA, 23 nt, Artificial Sequence
  Synthetic
cagaucugucaaaucgccugcag

SEQ ID NO: 247 - RNA, 25 nt, Artificial Sequence
  Synthetic
gugucuuucugagaaacuguucagc

SEQ ID NO: 248 - RNA, 28 nt, Artificial Sequence
  Synthetic
gagaaacuguucagcuucuguuagccac

SEQ ID NO: 249 - RNA, 28 nt, Artificial Sequence
  Synthetic
gaaacuguucagcuucuguuagccacug

SEQ ID NO: 250 - RNA, 24 nt, Artificial Sequence
  Synthetic
cuguucagcuucuguuagccacug

SEQ ID NO: 251 - RNA, 27 nt, Artificial Sequence
  Synthetic
aucugucaaaucgccugcagguaaaag

SEQ ID NO: 252 - RNA, 29 nt, Artificial Sequence
  Synthetic
gaucugucaaaucgccugcagguaaaagc

SEQ ID NO: 253 - RNA, 16 nt, Artificial Sequence
  Synthetic
caccgauugucuucga

SEQ ID NO: 254 - RNA, 17 nt, Artificial Sequence
  Synthetic
cccuuguacgauuuaug

SEQ ID NO: 255 - RNA, 18 nt, Artificial Sequence
  Synthetic
ucuguguuuaaggacucu

SEQ ID NO: 256 - RNA, 19 nt, Artificial Sequence
  Synthetic
gcugaauuauuucuucccc

SEQ ID NO: 257 - RNA, 19 nt, Artificial Sequence
  Synthetic
uuuuucugucugacagcug

SEQ ID NO: 258 - RNA, 18 nt, Artificial Sequence
  Synthetic
ucuguuuuugaggauugc

SEQ ID NO: 259 - RNA, 17 nt, Artificial Sequence
  Synthetic
ccaccgcagauucaggc

SEQ ID NO: 260 - RNA, 17 nt, Artificial Sequence
  Synthetic
gcccaaugccauccugg

SEQ ID NO: 261 - RNA, 17 nt, Artificial Sequence
  Synthetic
uuugcagaccuccugcc

SEQ ID NO: 262 - RNA, 17 nt, Artificial Sequence
  Synthetic
caguuugccgcugccca

SEQ ID NO: 263 - RNA, 20 nt, Artificial Sequence
  Synthetic
guugcauucaauguucugac

SEQ ID NO: 264 - RNA, 21 nt, Artificial Sequence
  Synthetic
auuuuuccuguagaauacugg

SEQ ID NO: 265 - RNA, 34 nt, Artificial Sequence
  Synthetic
gcugcccaaugcgauccuggaguuccuguaagau

SEQ ID NO: 266 - RNA, 28 nt, Artificial Sequence
  Synthetic
gcugcccaaugccauccuggaguuccug

SEQ ID NO: 267 - RNA, 31 nt, Artificial Sequence
  Synthetic
gcugcccaaugccauccuggaguuccuguaa

SEQ ID NO: 268 - RNA, 31 nt, Artificial Sequence
  Synthetic
caaugccauccuggaguuccuguaagauacc

SEQ ID NO: 269 - RNA, 32 nt, Artificial Sequence
  Synthetic
gcugcccaaugccauccuggaguuccuguaag

SEQ ID NO: 270 - RNA, 30 nt, Artificial Sequence
  Synthetic
ccaaugccauccuggaguuccuguaagaua

SEQ ID NO: 271 - RNA, 39 nt, Artificial Sequence
  Synthetic
uugccgcugcccaaugccauccuggaguuccuguaagau

SEQ ID NO: 272 - RNA, 34 nt, Artificial Sequence
  Synthetic
gcugcccaaugccauccuggaguuccuguaagau

SEQ ID NO: 273 - RNA, 27 nt, Artificial Sequence
  Synthetic
caaugccauccuggaguuccuguaaga

SEQ ID NO: 274 - RNA, 26 nt, Artificial Sequence
  Synthetic
caguuugccgcugcccaaugccaucc

SEQ ID NO: 275 - RNA, 24 nt, Artificial Sequence
  Synthetic
cuuccccaguugcauucaauguuc

SEQ ID NO: 276 - RNA, 23 nt, Artificial Sequence
  Synthetic
cuggcaucuguuuuugaggauug

SEQ ID NO: 277 - RNA, 20 nt, Artificial Sequence
  Synthetic
uuagaucugucgcccuaccu

SEQ ID NO: 278 - RNA, 39 nt, Artificial Sequence
  Synthetic
gcugcccaaugccauccuggaguuccuguaagauaccaa

SEQ ID NO: 279 - RNA, 34 nt, Artificial Sequence
  Synthetic
gcccaaugccauccuggaguuccuguaagauacc

SEQ ID NO: 280 - RNA, 25 nt, Artificial Sequence
  Synthetic
cauccuggaguuccuguaagauacc

SEQ ID NO: 281 - RNA, 28 nt, Artificial Sequence
  Synthetic
ugccauccuggaguuccuguaagauacc

SEQ ID NO: 282 - RNA, 25 nt, Artificial Sequence
  Synthetic
ugccauccuggaguuccuguaagau

SEQ ID NO: 283 - RNA, 28 nt, Artificial Sequence
  Synthetic
caaugccauccuggaguuccuguaagau

SEQ ID NO: 284 - RNA, 31 nt, Artificial Sequence
  Synthetic
gcccaaugccauccuggaguuccuguaagau

SEQ ID NO: 285 - RNA, 28 nt, Artificial Sequence
  Synthetic
gcccaaugccauccuggaguuccuguaa

SEQ ID NO: 286 - RNA, 34 nt, Artificial Sequence
  Synthetic
gccgcugcccaaugacauccuggaguuccuguaa

SEQ ID NO: 287 - RNA, 25 nt, Artificial Sequence
  Synthetic
gccauccuggaguuccuguaagaua

SEQ ID NO: 288 - RNA, 25 nt, Artificial Sequence
  Synthetic
ccaaugccauccuggaguuccugua

SEQ ID NO: 289 - RNA, 25 nt, Artificial Sequence
  Synthetic
cugacaacaguuugccgcugcccaa

SEQ ID NO: 290 - RNA, 25 nt, Artificial Sequence
  Synthetic
uuugaggauugcugaauuauuucuu

SEQ ID NO: 291 - RNA, 30 nt, Artificial Sequence
  Synthetic
caguuugccgcugcccaaugccauccugga

SEQ ID NO: 292 - RNA, 30 nt, Artificial Sequence
  Synthetic
uugccgcugcccaaugccauccuggaguuc

SEQ ID NO: 293 - RNA, 25 nt, Artificial Sequence
  Synthetic
uuugccgcugcccaaugccauccug

SEQ ID NO: 294 - RNA, 22 nt, Artificial Sequence
  Synthetic
ccaaugccauccuggaguuccu

SEQ ID NO: 295 - RNA, 29 nt, Artificial Sequence
  Synthetic
cccaaugccauccuggaguuccuguaaga

SEQ ID NO: 296 - RNA, 28 nt, Artificial Sequence
  Synthetic
ccgcugcccaaugccauccuggaguucc

SEQ ID NO: 297 - RNA, 30 nt, Artificial Sequence
  Synthetic
cccaaugccauccuggaguuccuguaagau

SEQ ID NO: 298 - RNA, 30 nt, Artificial Sequence
  Synthetic
ccgcugcccaaugccauccuggaguuccug

SEQ ID NO: 299 - RNA, 30 nt, Artificial Sequence
  Synthetic
ugcccaaugccauccuggaguuccuguaag

SEQ ID NO: 300 - RNA, 28 nt, Artificial Sequence
  Synthetic
cccaaugccauccuggaguuccuguaag

SEQ ID NO: 301 - RNA, 28 nt, Artificial Sequence
  Synthetic
ugcccaaugccauccuggaguuccugua

SEQ ID NO: 302 - RNA, 22 nt, Artificial Sequence
  Synthetic
caaugccauccuggaguuccug

SEQ ID NO: 303 - RNA, 31 nt, Artificial Sequence
  Synthetic
gccgcugcccaaugccauccuggaguuccug

SEQ ID NO: 304 - RNA, 29 nt, Artificial Sequence
  Synthetic
auuagaucugucgcccuaccucuuuuuuc

SEQ ID NO: 305 - RNA, 27 nt, Artificial Sequence
  Synthetic
ugucgcccuaccucuuuuuucugucug

SEQ ID NO: 306 - RNA, 25 nt, Artificial Sequence
  Synthetic
gcccaaugccauccuggaguuccug

SEQ ID NO: 307 - RNA, 29 nt, Artificial Sequence
  Synthetic
agccucucgcucacucacccugcaaagga

SEQ ID NO: 308 - RNA, 29 nt, Artificial Sequence
  Synthetic
ccacucagagcucagaucuucuaacuucc

SEQ ID NO: 309 - RNA, 27 nt, Artificial Sequence
  Synthetic
cuuccacucagagcucagaucuucuaa

SEQ ID NO: 310 - RNA, 25 nt, Artificial Sequence
  Synthetic
gggauccaguauacuuacaggcucc

SEQ ID NO: 311 - RNA, 17 nt, Artificial Sequence
  Synthetic
cucagagcucagaucuu

SEQ ID NO: 312 - RNA, 15 nt, Artificial Sequence
  Synthetic
ggcugcuuugcccuc

SEQ ID NO: 313 - RNA, 27 nt, Artificial Sequence
  Synthetic
cucagaucuucuaacuuccucuuuaac

SEQ ID NO: 314 - RNA, 29 nt, Artificial Sequence
  Synthetic
cucagagcucagaucuucuaacuuccucu

SEQ ID NO: 315 - RNA, 27 nt, Artificial Sequence
  Synthetic
cgccuuccacucagagcucagaucuuc

SEQ ID NO: 316 - RNA, 27 nt, Artificial Sequence
  Synthetic
ucagcucuugaaguaaacgguuuaccg

SEQ ID NO: 317 - RNA, 27 nt, Artificial Sequence
  Synthetic
uuugcccucagcucuugaaguaaacgg

SEQ ID NO: 318 - RNA, 27 nt, Artificial Sequence
  Synthetic
ggcugcuuugcccucagcucuugaagu

SEQ ID NO: 319 - RNA, 26 nt, Artificial Sequence
  Synthetic
caggagcuaggucaggcugcuuugcc

SEQ ID NO: 320 - RNA, 25 nt, Artificial Sequence
  Synthetic
uccaauaguggucaguccaggagcu

SEQ ID NO: 321 - RNA, 27 nt, Artificial Sequence
  Synthetic
aaagagaaugggauccaguauacuuac

SEQ ID NO: 322 - RNA, 27 nt, Artificial Sequence
  Synthetic
aaauagcuagagccaaagagaauggga

SEQ ID NO: 323 - RNA, 33 nt, Artificial Sequence
  Synthetic
ggcugcuuugcccucagcucuugaaguaaacgg

SEQ ID NO: 324 - RNA, 30 nt, Artificial Sequence
  Synthetic
aggcugcuuugcccucagcucuugaaguaa

SEQ ID NO: 325 - RNA, 30 nt, Artificial Sequence
  Synthetic
gucaggcugcuuugcccucagcucuugaag

SEQ ID NO: 326 - RNA, 30 nt, Artificial Sequence
  Synthetic
aggucaggcugcuuugcccucagcucuuga

SEQ ID NO: 327 - RNA, 25 nt, Artificial Sequence
  Synthetic
cagagcucagaucuucuaacuuccu

SEQ ID NO: 328 - RNA, 25 nt, Artificial Sequence
  Synthetic
cuuacaggcuccaauaguggucagu

SEQ ID NO: 329 - RNA, 25 nt, Artificial Sequence
  Synthetic
augggauccaguauacuuacaggcu

SEQ ID NO: 330 - RNA, 25 nt, Artificial Sequence
  Synthetic
agagaaugggauccaguauacuuac

SEQ ID NO: 331 - RNA, 27 nt, Artificial Sequence
  Synthetic
aacuuccucuuuaacagaaaagcauac

SEQ ID NO: 332 - RNA, 30 nt, Artificial Sequence
  Synthetic
gagccucucgcucacucacccugcaaagga

SEQ ID NO: 333 - RNA, 23 nt, Artificial Sequence
  Synthetic
cucauaccuucugcuugaugauc

SEQ ID NO: 334 - RNA, 20 nt, Artificial Sequence
  Synthetic
ucaaggaagauggcauuucu

SEQ ID NO: 335 - RNA, 20 nt, Artificial Sequence
  Synthetic
gaaagccagucgguaaguuc

SEQ ID NO: 336 - RNA, 15 nt, Artificial Sequence
  Synthetic
cacccaccaucaccc

SEQ ID NO: 337 - RNA, 23 nt, Artificial Sequence
  Synthetic
ccucugugauuuuauaacuugau

SEQ ID NO: 338 - RNA, 20 nt, Artificial Sequence
  Synthetic
ugauauccucaaggucaccc

SEQ ID NO: 339 - RNA, 30 nt, Artificial Sequence
  Synthetic
gguaccuccaacaucaaggaagauggcauu

SEQ ID NO: 340 - RNA, 26 nt, Artificial Sequence
  Synthetic
auuucuaguuuggagauggcaguuuc

SEQ ID NO: 341 - RNA, 26 nt, Artificial Sequence
  Synthetic
caucaaggaagauggcauuucuaguu

SEQ ID NO: 342 - RNA, 26 nt, Artificial Sequence
  Synthetic
gagcagguaccuccaacaucaaggaa

SEQ ID NO: 343 - RNA, 30 nt, Artificial Sequence
  Synthetic
cuccaacaucaaggaagauggcauuucuag

SEQ ID NO: 344 - RNA, 25 nt, Artificial Sequence
  Synthetic
accagaguaacagucugaguaggag

SEQ ID NO: 345 - RNA, 25 nt, Artificial Sequence
  Synthetic
caccagaguaacagucugaguagga

SEQ ID NO: 346 - RNA, 25 nt, Artificial Sequence
  Synthetic
ucaccagaguaacagucugaguagg

SEQ ID NO: 347 - RNA, 25 nt, Artificial Sequence
  Synthetic
gucaccagaguaacagucugaguag

SEQ ID NO: 348 - RNA, 26 nt, Artificial Sequence
  Synthetic
accagaguaacagucugaguaggagc

SEQ ID NO: 349 - RNA, 24 nt, Artificial Sequence
  Synthetic
uucuguccaagcccgguugaaauc

SEQ ID NO: 350 - RNA, 30 nt, Artificial Sequence
  Synthetic
acaucaaggaagauggcauuucuaguuugg

SEQ ID NO: 351 - RNA, 25 nt, Artificial Sequence
  Synthetic
acaucaaggaagauggcauuucuag

SEQ ID NO: 352 - RNA, 25 nt, Artificial Sequence
  Synthetic
aucauuuuuucucauaccuucugcu

SEQ ID NO: 353 - RNA, 21 nt, Artificial Sequence
  Synthetic
cacccaccaucacccucugug

SEQ ID NO: 354 - RNA, 22 nt, Artificial Sequence
  Synthetic
aucaucucguugauauccucaa

SEQ ID NO: 355 - RNA, 28 nt, Artificial Sequence
  Synthetic
cuccaacaucaaggaagauggcauuucu

SEQ ID NO: 356 - RNA, 25 nt, Artificial Sequence
  Synthetic
caucaaggaagauggcauuucuagu

SEQ ID NO: 357 - RNA, 36 nt, Artificial Sequence
  Synthetic
aucauuuuuucucauaccuucugcuaggagcuaaaa

SEQ ID NO: 358 - RNA, 18 nt, Artificial Sequence
  Synthetic
uugcuggucuuguuuuuc

SEQ ID NO: 359 - RNA, 16 nt, Artificial Sequence
  Synthetic
ccguaaugauuguucu

SEQ ID NO: 360 - RNA, 18 nt, Artificial Sequence
  Synthetic
gcuggucuuguuuuucaa

SEQ ID NO: 361 - RNA, 20 nt, Artificial Sequence
  Synthetic
uggucuuguuuuucaaauuu

SEQ ID NO: 362 - RNA, 20 nt, Artificial Sequence
  Synthetic
gucuuguuuuucaaauuuug

SEQ ID NO: 363 - RNA, 20 nt, Artificial Sequence
  Synthetic
cuuguuuuucaaauuuuggg

SEQ ID NO: 364 - RNA, 19 nt, Artificial Sequence
  Synthetic
uguuuuucaaauuuugggc

SEQ ID NO: 365 - RNA, 33 nt, Artificial Sequence
  Synthetic
uccaacuggggacgccucuguuccaaauccugc

SEQ ID NO: 366 - RNA, 21 nt, Artificial Sequence
  Synthetic
uccugcauuguugccuguaag

SEQ ID NO: 367 - RNA, 30 nt, Artificial Sequence
  Synthetic
uccaacuggggacgccucuguuccaaaucc

SEQ ID NO: 368 - RNA, 21 nt, Artificial Sequence
  Synthetic
acuggggacgccucuguucca

SEQ ID NO: 369 - RNA, 20 nt, Artificial Sequence
  Synthetic
ccguaaugauuguucuagcc

SEQ ID NO: 370 - RNA, 20 nt, Artificial Sequence
  Synthetic
uguuaaaaaacuuacuucga

SEQ ID NO: 371 - RNA, 18 nt, Artificial Sequence
  Synthetic
cuguugccuccgguucug

SEQ ID NO: 372 - RNA, 18 nt, Artificial Sequence
  Synthetic
uuggcucuggccuguccu

SEQ ID NO: 373 - RNA, 33 nt, Artificial Sequence
  Synthetic
uucaacuguugccuccgguucugaagguguucu

SEQ ID NO: 374 - RNA, 25 nt, Artificial Sequence
  Synthetic
uacuucaucccacugauucugaauu

SEQ ID NO: 375 - RNA, 25 nt, Artificial Sequence
  Synthetic
cugaagguguucuuguacuucaucc

SEQ ID NO: 376 - RNA, 25 nt, Artificial Sequence
  Synthetic
cuguugccuccgguucugaaggugu

SEQ ID NO: 377 - RNA, 30 nt, Artificial Sequence
  Synthetic
cuguugccuccgguucugaagguguucuug

SEQ ID NO: 378 - RNA, 30 nt, Artificial Sequence
  Synthetic
caacuguugccuccgguucugaagguguuc

SEQ ID NO: 379 - RNA, 30 nt, Artificial Sequence
  Synthetic
uugccuccgguucugaagguguucuuguac

SEQ ID NO: 380 - RNA, 25 nt, Artificial Sequence
  Synthetic
guugccuccgguucugaagguguuc

SEQ ID NO: 381 - RNA, 23 nt, Artificial Sequence
  Synthetic
cuccgguucugaagguguucuug

SEQ ID NO: 382 - RNA, 22 nt, Artificial Sequence
  Synthetic
cuccgguucugaagguguucuu

SEQ ID NO: 383 - RNA, 21 nt, Artificial Sequence
  Synthetic
cuccgguucugaagguguucu

SEQ ID NO: 384 - RNA, 20 nt, Artificial Sequence
  Synthetic
cuccgguucugaagguguuc

SEQ ID NO: 385 - RNA, 19 nt, Artificial Sequence
  Synthetic
cuccgguucugaagguguu

SEQ ID NO: 386 - RNA, 25 nt, Artificial Sequence
  Synthetic
cauucaacuguugccuccgguucug

SEQ ID NO: 387 - RNA, 24 nt, Artificial Sequence
  Synthetic
cuguugccuccgguucugaaggug

SEQ ID NO: 388 - RNA, 31 nt, Artificial Sequence
  Synthetic
cauucaacuguugccuccgguucugaaggug

SEQ ID NO: 389 - RNA, 21 nt, Artificial Sequence
  Synthetic
uacuaaccuugguuucuguga

SEQ ID NO: 390 - RNA, 27 nt, Artificial Sequence
  Synthetic
uguauagggacccuccuuccaugacuc

SEQ ID NO: 391 - RNA, 25 nt, Artificial Sequence
  Synthetic
cuaaccuugguuucugugauuuucu

SEQ ID NO: 392 - RNA, 27 nt, Artificial Sequence
  Synthetic
gguaucuuugauacuaaccuugguuuc

SEQ ID NO: 393 - RNA, 22 nt, Artificial Sequence
  Synthetic
auucuuucaacuagaauaaaag

SEQ ID NO: 394 - RNA, 25 nt, Artificial Sequence
  Synthetic
gauucugaauucuuucaacuagaau

SEQ ID NO: 395 - RNA, 20 nt, Artificial Sequence
  Synthetic
aucccacugauucugaauuc

SEQ ID NO: 396 - RNA, 22 nt, Artificial Sequence
  Synthetic
aaccgagaccggacaggauucu

SEQ ID NO: 397 - RNA, 26 nt, Artificial Sequence
  Synthetic
ggaagcuaaggaagaagcugagcagg

SEQ ID NO: 398 - RNA, 20 nt, Artificial Sequence
  Synthetic
cuguugcaguaaucuaugag

SEQ ID NO: 399 - RNA, 23 nt, Artificial Sequence
  Synthetic
ugccauuguuucaucagcucuuu

SEQ ID NO: 400 - RNA, 20 nt, Artificial Sequence
  Synthetic
ugcaguaaucuaugaguuuc

SEQ ID NO: 401 - RNA, 20 nt, Artificial Sequence
  Synthetic
uccuguaggacauuggcagu

SEQ ID NO: 402 - DNA, 7 bp, Artificial Sequence
  Synthetic
ctactca

SEQ ID NO: 403 - DNA, 7 bp, Artificial Sequence
  Synthetic
cagactg

SEQ ID NO: 404 - DNA, 8 bp, Artificial Sequence
  Synthetic
gactgtta

SEQ ID NO: 405 - DNA, 7 bp, Artificial Sequence
  Synthetic
ttactct

SEQ ID NO: 406 - DNA, 7 bp, Artificial Sequence
  Synthetic
actctgg

SEQ ID NO: 407 - DNA, 7 bp, Artificial Sequence
  Synthetic
ctctggt

SEQ ID NO: 408 - DNA, 7 bp, Artificial Sequence
  Synthetic
tgacaca

SEQ ID NO: 409 - DNA, 7 bp, Artificial Sequence
  Synthetic
gacacaa

SEQ ID NO: 410 - DNA, 7 bp, Artificial Sequence
  Synthetic
acacaac

SEQ ID NO: 411 - DNA, 8 bp, Artificial Sequence
  Synthetic
aacctgtg

SEQ ID NO: 412 - DNA, 7 bp, Artificial Sequence
  Synthetic
cctgtgg

SEQ ID NO: 413 - DNA, 7 bp, Artificial Sequence
  Synthetic
ctgtggt

SEQ ID NO: 414 - DNA, 8 bp, Artificial Sequence
  Synthetic
ggttacta

SEQ ID NO: 415 - DNA, 7 bp, Artificial Sequence
  Synthetic
ttactaa

SEQ ID NO: 416 - DNA, 7 bp, Artificial Sequence
  Synthetic
ctaagga

SEQ ID NO: 417 - DNA, 7 bp, Artificial Sequence
  Synthetic
ctgccat

SEQ ID NO: 418 - DNA, 7 bp, Artificial Sequence
  Synthetic
caaacta

SEQ ID NO: 419 - DNA, 7 bp, Artificial Sequence
  Synthetic
tggaggt

SEQ ID NO: 420 - DNA, 8 bp, Artificial Sequence
  Synthetic
ggtacctg

SEQ ID NO: 421 - DNA, 8 bp, Artificial Sequence
  Synthetic
gatttcaa

SEQ ID NO: 422 - DNA, 7 bp, Artificial Sequence
  Synthetic
tttcaac

SEQ ID NO: 423 - DNA, 7 bp, Artificial Sequence
  Synthetic
tcaaccg

SEQ ID NO: 424 - DNA, 7 bp, Artificial Sequence
  Synthetic
caaccgg

SEQ ID NO: 425 - DNA, 8 bp, Artificial Sequence
  Synthetic
ggacagaa

SEQ ID NO: 426 - DNA, 7 bp, Artificial Sequence
  Synthetic
ccgactg

SEQ ID NO: 427 - DNA, 7 bp, Artificial Sequence
  Synthetic
cgactgg

SEQ ID NO: 428 - DNA, 8 bp, Artificial Sequence
  Synthetic
tttctctg

SEQ ID NO: 429 - DNA, 7 bp, Artificial Sequence
  Synthetic
tctctgc

SEQ ID NO: 430 - DNA, 7 bp, Artificial Sequence
  Synthetic
tcacaga

SEQ ID NO: 431 - DNA, 6 bp, Artificial Sequence
  Synthetic
cacaga

SEQ ID NO: 432 - DNA, 7 bp, Artificial Sequence
  Synthetic
acagagg

SEQ ID NO: 433 - DNA, 7 bp, Artificial Sequence
  Synthetic
cagaggg

SEQ ID NO: 434 - DNA, 7 bp, Artificial Sequence
  Synthetic
cttgagg

SEQ ID NO: 435 - DNA, 6 bp, Artificial Sequence
  Synthetic
tgagga

SEQ ID NO: 436 - DNA, 7 bp, Artificial Sequence
  Synthetic
gagatga

SEQ ID NO: 437 - DNA, 30 bp, Artificial Sequence
  Synthetic
tgagtaggagctaaaatattttgggttttt

SEQ ID NO: 438 - DNA, 40 bp, Artificial Sequence
  Synthetic
agtaacagtctgagtaggagctaaaatattttgggttttt

SEQ ID NO: 439 - DNA, 30 bp, Artificial Sequence
  Synthetic
ctgagtaggagctaaaatattttgggtttt

SEQ ID NO: 440 - DNA, 30 bp, Artificial Sequence
  Synthetic
tctgagtaggagctaaaatattttgggttt

SEQ ID NO: 441 - DNA, 30 bp, Artificial Sequence
  Synthetic
gtctgagtaggagctaaaatattttgggtt

SEQ ID NO: 442 - DNA, 30 bp, Artificial Sequence
  Synthetic
agtctgagtaggagctaaaatattttgggt

SEQ ID NO: 443 - DNA, 30 bp, Artificial Sequence
  Synthetic
cagtctgagtaggagctaaaatattttggg

SEQ ID NO: 444 - DNA, 25 bp, Artificial Sequence
  Synthetic
tgagtaggagctaaaatattttggg

SEQ ID NO: 445 - DNA, 28 bp, Artificial Sequence
  Synthetic
gtctgagtaggagctaaaatattttggg

SEQ ID NO: 446 - DNA, 26 bp, Artificial Sequence
  Synthetic
ctgagtaggagctaaaatattttggg

SEQ ID NO: 447 - DNA, 30 bp, Artificial Sequence
  Synthetic
acagtctgagtaggagctaaaatattttgg

SEQ ID NO: 448 - DNA, 24 bp, Artificial Sequence
  Synthetic
tgagtaggagctaaaatattttgg

SEQ ID NO: 449 - DNA, 30 bp, Artificial Sequence
  Synthetic
aacagtctgagtaggagctaaaatattttg

SEQ ID NO: 450 - DNA, 30 bp, Artificial Sequence
  Synthetic
taacagtctgagtaggagctaaaatatttt

SEQ ID NO: 451 - DNA, 44 bp, Artificial Sequence
  Synthetic
ttgtgtcaccagagtaacagtctgagtaggagctaaaatatttt

SEQ ID NO: 452 - DNA, 23 bp, Artificial Sequence
  Synthetic
ctgagtaggagctaaaatatttt

SEQ ID NO: 453 - DNA, 30 bp, Artificial Sequence
  Synthetic
gtaacagtctgagtaggagctaaaatattt

SEQ ID NO: 454 - DNA, 40 bp, Artificial Sequence
  Synthetic
tgtcaccagagtaacagtctgagtaggagctaaaatattt

SEQ ID NO: 455 - DNA, 20 bp, Artificial Sequence
  Synthetic
tgagtaggagctaaaatatt

SEQ ID NO: 456 - DNA, 30 bp, Artificial Sequence
  Synthetic
agtaacagtctgagtaggagctaaaatatt

SEQ ID NO: 457 - DNA, 26 bp, Artificial Sequence
  Synthetic
acagtctgagtaggagctaaaatatt

SEQ ID NO: 458 - DNA, 25 bp, Artificial Sequence
  Synthetic
cagtctgagtaggagctaaaatatt

SEQ ID NO: 459 - DNA, 21 bp, Artificial Sequence
  Synthetic
ctgagtaggagctaaaatatt

SEQ ID NO: 460 - DNA, 20 bp, Artificial Sequence
  Synthetic
ctgagtaggagctaaaatat

SEQ ID NO: 461 - DNA, 30 bp, Artificial Sequence
  Synthetic
gagtaacagtctgagtaggagctaaaatat

SEQ ID NO: 462 - DNA, 21 bp, Artificial Sequence
  Synthetic
tctgagtaggagctaaaatat

SEQ ID NO: 463 - DNA, 20 bp, Artificial Sequence
  Synthetic
tctgagtaggagctaaaata

SEQ ID NO: 464 - DNA, 30 bp, Artificial Sequence
  Synthetic
agagtaacagtctgagtaggagctaaaata

SEQ ID NO: 465 - DNA, 35 bp, Artificial Sequence
  Synthetic
tcaccagagtaacagtctgagtaggagctaaaata

SEQ ID NO: 466 - DNA, 20 bp, Artificial Sequence
  Synthetic
gtctgagtaggagctaaaat

SEQ ID NO: 467 - DNA, 30 bp, Artificial Sequence
  Synthetic
cagagtaacagtctgagtaggagctaaaat

SEQ ID NO: 468 - DNA, 20 bp, Artificial Sequence
  Synthetic
agtctgagtaggagctaaaa

SEQ ID NO: 469 - DNA, 30 bp, Artificial Sequence
  Synthetic
ccagagtaacagtctgagtaggagctaaaa

SEQ ID NO: 470 - DNA, 23 bp, Artificial Sequence
  Synthetic
aacagtctgagtaggagctaaaa

SEQ ID NO: 471 - DNA, 44 bp, Artificial Sequence
  Synthetic
cacaggttgtgtcaccagagtaacagtctgagtaggagctaaaa

SEQ ID NO: 472 - DNA, 20 bp, Artificial Sequence
  Synthetic
cagtctgagtaggagctaaa

SEQ ID NO: 473 - DNA, 30 bp, Artificial Sequence
  Synthetic
accagagtaacagtctgagtaggagctaaa

SEQ ID NO: 474 - DNA, 26 bp, Artificial Sequence
  Synthetic
gagtaacagtctgagtaggagctaaa

SEQ ID NO: 475 - DNA, 25 bp, Artificial Sequence
  Synthetic
agtaacagtctgagtaggagctaaa

SEQ ID NO: 476 - DNA, 20 bp, Artificial Sequence
  Synthetic
acagtctgagtaggagctaa

SEQ ID NO: 477 - DNA, 30 bp, Artificial Sequence
  Synthetic
caccagagtaacagtctgagtaggagctaa

SEQ ID NO: 478 - DNA, 20 bp, Artificial Sequence
  Synthetic
aacagtctgagtaggagcta

SEQ ID NO: 479 - DNA, 30 bp, Artificial Sequence
  Synthetic
tcaccagagtaacagtctgagtaggagcta

SEQ ID NO: 480 - DNA, 36 bp, Artificial Sequence
  Synthetic
gttgtgtcaccagagtaacagtctgagtaggagcta

SEQ ID NO: 481 - DNA, 20 bp, Artificial Sequence
  Synthetic
taacagtctgagtaggagct

SEQ ID NO: 482 - DNA, 30 bp, Artificial Sequence
  Synthetic
gtcaccagagtaacagtctgagtaggagct

SEQ ID NO: 483 - DNA, 24 bp, Artificial Sequence
  Synthetic
agagtaacagtctgagtaggagct

SEQ ID NO: 484 - DNA, 25 bp, Artificial Sequence
  Synthetic
cagagtaacagtctgagtaggagct

SEQ ID NO: 485 - DNA, 20 bp, Artificial Sequence
  Synthetic
gtaacagtctgagtaggagc

SEQ ID NO: 486 - DNA, 30 bp, Artificial Sequence
  Synthetic
tgtcaccagagtaacagtctgagtaggagc

SEQ ID NO: 487 - DNA, 24 bp, Artificial Sequence
  Synthetic
cagagtaacagtctgagtaggagc

SEQ ID NO: 488 - DNA, 26 bp, Artificial Sequence
  Synthetic
accagagtaacagtctgagtaggagc

SEQ ID NO: 489 - DNA, 25 bp, Artificial Sequence
  Synthetic
ccagagtaacagtctgagtaggagc

SEQ ID NO: 490 - DNA, 20 bp, Artificial Sequence
  Synthetic
agtaacagtctgagtaggag

SEQ ID NO: 491 - DNA, 30 bp, Artificial Sequence
  Synthetic
gtgtcaccagagtaacagtctgagtaggag

SEQ ID NO: 492 - DNA, 25 bp, Artificial Sequence
  Synthetic
accagagtaacagtctgagtaggag

SEQ ID NO: 493 - DNA, 18 bp, Artificial Sequence
  Synthetic
taacagtctgagtaggag

SEQ ID NO: 494 - DNA, 21 bp, Artificial Sequence
  Synthetic
gagtaacagtctgagtaggag

SEQ ID NO: 495 - DNA, 31 bp, Artificial Sequence
  Synthetic
tgtgtcaccagagtaacagtctgagtaggag

SEQ ID NO: 496 - DNA, 26 bp, Artificial Sequence
  Synthetic
caccagagtaacagtctgagtaggag

SEQ ID NO: 497 - DNA, 29 bp, Artificial Sequence
  Synthetic
tgtcaccagagtaacagtctgagtaggag

SEQ ID NO: 498 - DNA, 28 bp, Artificial Sequence
  Synthetic
gtcaccagagtaacagtctgagtaggag

SEQ ID NO: 499 - DNA, 27 bp, Artificial Sequence
  Synthetic
tcaccagagtaacagtctgagtaggag

SEQ ID NO: 500 - DNA, 23 bp, Artificial Sequence
  Synthetic
cagagtaacagtctgagtaggag

SEQ ID NO: 501 - DNA, 20 bp, Artificial Sequence
  Synthetic
gagtaacagtctgagtagga

SEQ ID NO: 502 - DNA, 30 bp, Artificial Sequence
  Synthetic
tgtgtcaccagagtaacagtctgagtagga

SEQ ID NO: 503 - DNA, 25 bp, Artificial Sequence
  Synthetic
caccagagtaacagtctgagtagga

SEQ ID NO: 504 - DNA, 23 bp, Artificial Sequence
  Synthetic
ccagagtaacagtctgagtagga

SEQ ID NO: 505 - DNA, 20 bp, Artificial Sequence
  Synthetic
agagtaacagtctgagtagg

SEQ ID NO: 506 - DNA, 30 bp, Artificial Sequence
  Synthetic
ttgtgtcaccagagtaacagtctgagtagg

SEQ ID NO: 507 - DNA, 25 bp, Artificial Sequence
  Synthetic
tcaccagagtaacagtctgagtagg

SEQ ID NO: 508 - DNA, 19 bp, Artificial Sequence
  Synthetic
gagtaacagtctgagtagg

SEQ ID NO: 509 - DNA, 20 bp, Artificial Sequence
  Synthetic
cagagtaacagtctgagtag

SEQ ID NO: 510 - DNA, 30 bp, Artificial Sequence
  Synthetic
gttgtgtcaccagagtaacagtctgagtag

SEQ ID NO: 511 - DNA, 25 bp, Artificial Sequence
  Synthetic
gtcaccagagtaacagtctgagtag

SEQ ID NO: 512 - DNA, 26 bp, Artificial Sequence
  Synthetic
tgtcaccagagtaacagtctgagtag

SEQ ID NO: 513 - DNA, 19 bp, Artificial Sequence
  Synthetic
agagtaacagtctgagtag

SEQ ID NO: 514 - DNA, 20 bp, Artificial Sequence
  Synthetic
ccagagtaacagtctgagta

SEQ ID NO: 515 - DNA, 30 bp, Artificial Sequence
  Synthetic
ggttgtgtcaccagagtaacagtctgagta

SEQ ID NO: 516 - DNA, 25 bp, Artificial Sequence
  Synthetic
tgtcaccagagtaacagtctgagta

SEQ ID NO: 517 - DNA, 20 bp, Artificial Sequence
  Synthetic
accagagtaacagtctgagt

SEQ ID NO: 518 - DNA, 30 bp, Artificial Sequence
  Synthetic
aggttgtgtcaccagagtaacagtctgagt

SEQ ID NO: 519 - DNA, 25 bp, Artificial Sequence
  Synthetic
gtgtcaccagagtaacagtctgagt

SEQ ID NO: 520 - DNA, 20 bp, Artificial Sequence
  Synthetic
caccagagtaacagtctgag

SEQ ID NO: 521 - DNA, 30 bp, Artificial Sequence
  Synthetic
caggttgtgtcaccagagtaacagtctgag

SEQ ID NO: 522 - DNA, 25 bp, Artificial Sequence
  Synthetic
tgtgtcaccagagtaacagtctgag

SEQ ID NO: 523 - DNA, 32 bp, Artificial Sequence
  Synthetic
cacaggttgtgtcaccagagtaacagtctgag

SEQ ID NO: 524 - DNA, 20 bp, Artificial Sequence
  Synthetic
tcaccagagtaacagtctga

SEQ ID NO: 525 - DNA, 30 bp, Artificial Sequence
  Synthetic
acaggttgtgtcaccagagtaacagtctga

SEQ ID NO: 526 - DNA, 25 bp, Artificial Sequence
  Synthetic
ttgtgtcaccagagtaacagtctga

SEQ ID NO: 527 - DNA, 20 bp, Artificial Sequence
  Synthetic
gtcaccagagtaacagtctg

SEQ ID NO: 528 - DNA, 30 bp, Artificial Sequence
  Synthetic
cacaggttgtgtcaccagagtaacagtctg

SEQ ID NO: 529 - DNA, 25 bp, Artificial Sequence
  Synthetic
gttgtgtcaccagagtaacagtctg

SEQ ID NO: 530 - DNA, 20 bp, Artificial Sequence
  Synthetic
tgtcaccagagtaacagtct

SEQ ID NO: 531 - DNA, 30 bp, Artificial Sequence
  Synthetic
ccacaggttgtgtcaccagagtaacagtct

SEQ ID NO: 532 - DNA, 25 bp, Artificial Sequence
  Synthetic
ggttgtgtcaccagagtaacagtct

SEQ ID NO: 533 - DNA, 19 bp, Artificial Sequence
  Synthetic
gtcaccagagtaacagtct

SEQ ID NO: 534 - DNA, 34 bp, Artificial Sequence
  Synthetic
gtaaccacaggttgtgtcaccagagtaacagtct

SEQ ID NO: 535 - DNA, 23 bp, Artificial Sequence
  Synthetic
ttgtgtcaccagagtaacagtct

SEQ ID NO: 536 - DNA, 20 bp, Artificial Sequence
  Synthetic
gtgtcaccagagtaacagtc

SEQ ID NO: 537 - DNA, 30 bp, Artificial Sequence
  Synthetic
accacaggttgtgtcaccagagtaacagtc

SEQ ID NO: 538 - DNA, 25 bp, Artificial Sequence
  Synthetic
aggttgtgtcaccagagtaacagtc

SEQ ID NO: 539 - DNA, 21 bp, Artificial Sequence
  Synthetic
tgtgtcaccagagtaacagtc

SEQ ID NO: 540 - DNA, 20 bp, Artificial Sequence
  Synthetic
tgtgtcaccagagtaacagt

SEQ ID NO: 541 - DNA, 30 bp, Artificial Sequence
  Synthetic
aaccacaggttgtgtcaccagagtaacagt

SEQ ID NO: 542 - DNA, 21 bp, Artificial Sequence
  Synthetic
ttgtgtcaccagagtaacagt

SEQ ID NO: 543 - DNA, 25 bp, Artificial Sequence
  Synthetic
caggttgtgtcaccagagtaacagt

SEQ ID NO: 544 - DNA, 19 bp, Artificial Sequence
  Synthetic
gtgtcaccagagtaacagt

SEQ ID NO: 545 - DNA, 20 bp, Artificial Sequence
  Synthetic
ttgtgtcaccagagtaacag

SEQ ID NO: 546 - DNA, 30 bp, Artificial Sequence
  Synthetic
taaccacaggttgtgtcaccagagtaacag

SEQ ID NO: 547 - DNA, 23 bp, Artificial Sequence
  Synthetic
aggttgtgtcaccagagtaacag

SEQ ID NO: 548 - DNA, 25 bp, Artificial Sequence
  Synthetic
acaggttgtgtcaccagagtaacag

SEQ ID NO: 549 - DNA, 20 bp, Artificial Sequence
  Synthetic
gttgtgtcaccagagtaaca

SEQ ID NO: 550 - DNA, 30 bp, Artificial Sequence
  Synthetic
gtaaccacaggttgtgtcaccagagtaaca

SEQ ID NO: 551 - DNA, 25 bp, Artificial Sequence
  Synthetic
cacaggttgtgtcaccagagtaaca

SEQ ID NO: 552 - DNA, 20 bp, Artificial Sequence
  Synthetic
ggttgtgtcaccagagtaac

SEQ ID NO: 553 - DNA, 30 bp, Artificial Sequence
  Synthetic
agtaaccacaggttgtgtcaccagagtaac

SEQ ID NO: 554 - DNA, 25 bp, Artificial Sequence
  Synthetic
ccacaggttgtgtcaccagagtaac

SEQ ID NO: 555 - DNA, 20 bp, Artificial Sequence
  Synthetic
aggttgtgtcaccagagtaa

SEQ ID NO: 556 - DNA, 30 bp, Artificial Sequence
  Synthetic
tagtaaccacaggttgtgtcaccagagtaa

SEQ ID NO: 557 - DNA, 25 bp, Artificial Sequence
  Synthetic
accacaggttgtgtcaccagagtaa

SEQ ID NO: 558 - DNA, 26 bp, Artificial Sequence
  Synthetic
aaccacaggttgtgtcaccagagtaa

SEQ ID NO: 559 - DNA, 20 bp, Artificial Sequence
  Synthetic
caggttgtgtcaccagagta

SEQ ID NO: 560 - DNA, 30 bp, Artificial Sequence
  Synthetic
ttagtaaccacaggttgtgtcaccagagta

SEQ ID NO: 561 - DNA, 25 bp, Artificial Sequence
  Synthetic
aaccacaggttgtgtcaccagagta

SEQ ID NO: 562 - DNA, 20 bp, Artificial Sequence
  Synthetic
acaggttgtgtcaccagagt

SEQ ID NO: 563 - DNA, 30 bp, Artificial Sequence
  Synthetic
cttagtaaccacaggttgtgtcaccagagt

SEQ ID NO: 564 - DNA, 25 bp, Artificial Sequence
  Synthetic
taaccacaggttgtgtcaccagagt

SEQ ID NO: 565 - DNA, 20 bp, Artificial Sequence
  Synthetic
cacaggttgtgtcaccagag

SEQ ID NO: 566 - DNA, 30 bp, Artificial Sequence
  Synthetic
ccttagtaaccacaggttgtgtcaccagag

SEQ ID NO: 567 - DNA, 25 bp, Artificial Sequence
  Synthetic
gtaaccacaggttgtgtcaccagag

SEQ ID NO: 568 - DNA, 20 bp, Artificial Sequence
  Synthetic
ccacaggttgtgtcaccaga

SEQ ID NO: 569 - DNA, 30 bp, Artificial Sequence
  Synthetic
tccttagtaaccacaggttgtgtcaccaga

SEQ ID NO: 570 - DNA, 25 bp, Artificial Sequence
  Synthetic
agtaaccacaggttgtgtcaccaga

SEQ ID NO: 571 - DNA, 20 bp, Artificial Sequence
  Synthetic
accacaggttgtgtcaccag

SEQ ID NO: 572 - DNA, 30 bp, Artificial Sequence
  Synthetic
ttccttagtaaccacaggttgtgtcaccag

SEQ ID NO: 573 - DNA, 19 bp, Artificial Sequence
  Synthetic
ccacaggttgtgtcaccag

SEQ ID NO: 574 - DNA, 25 bp, Artificial Sequence
  Synthetic
tagtaaccacaggttgtgtcaccag

SEQ ID NO: 575 - DNA, 21 bp, Artificial Sequence
  Synthetic
aaccacaggttgtgtcaccag

SEQ ID NO: 576 - DNA, 20 bp, Artificial Sequence
  Synthetic
aaccacaggttgtgtcacca

SEQ ID NO: 577 - DNA, 30 bp, Artificial Sequence
  Synthetic
tttccttagtaaccacaggttgtgtcacca

SEQ ID NO: 578 - DNA, 25 bp, Artificial Sequence
  Synthetic
ttagtaaccacaggttgtgtcacca

SEQ ID NO: 579 - DNA, 20 bp, Artificial Sequence
  Synthetic
taaccacaggttgtgtcacc

SEQ ID NO: 580 - DNA, 30 bp, Artificial Sequence
  Synthetic
gtttccttagtaaccacaggttgtgtcacc

SEQ ID NO: 581 - DNA, 23 bp, Artificial Sequence
  Synthetic
tagtaaccacaggttgtgtcacc

SEQ ID NO: 582 - DNA, 25 bp, Artificial Sequence
  Synthetic
cttagtaaccacaggttgtgtcacc

SEQ ID NO: 583 - DNA, 20 bp, Artificial Sequence
  Synthetic
gtaaccacaggttgtgtcac

SEQ ID NO: 584 - DNA, 30 bp, Artificial Sequence
  Synthetic
agtttccttagtaaccacaggttgtgtcac

SEQ ID NO: 585 - DNA, 25 bp, Artificial Sequence
  Synthetic
ccttagtaaccacaggttgtgtcac

SEQ ID NO: 586 - DNA, 21 bp, Artificial Sequence
  Synthetic
agtaaccacaggttgtgtcac

SEQ ID NO: 587 - DNA, 24 bp, Artificial Sequence
  Synthetic
cttagtaaccacaggttgtgtcac

SEQ ID NO: 588 - DNA, 20 bp, Artificial Sequence
  Synthetic
agtaaccacaggttgtgtca

SEQ ID NO: 589 - DNA, 30 bp, Artificial Sequence
  Synthetic
cagtttccttagtaaccacaggttgtgtca

SEQ ID NO: 590 - DNA, 25 bp, Artificial Sequence
  Synthetic
tccttagtaaccacaggttgtgtca

SEQ ID NO: 591 - DNA, 20 bp, Artificial Sequence
  Synthetic
tagtaaccacaggttgtgtc

SEQ ID NO: 592 - DNA, 30 bp, Artificial Sequence
  Synthetic
gcagtttccttagtaaccacaggttgtgtc

SEQ ID NO: 593 - DNA, 25 bp, Artificial Sequence
  Synthetic
ttccttagtaaccacaggttgtgtc

SEQ ID NO: 594 - DNA, 27 bp, Artificial Sequence
  Synthetic
gtttccttagtaaccacaggttgtgtc

SEQ ID NO: 595 - DNA, 20 bp, Artificial Sequence
  Synthetic
ttagtaaccacaggttgtgt

SEQ ID NO: 596 - DNA, 30 bp, Artificial Sequence
  Synthetic
ggcagtttccttagtaaccacaggttgtgt

SEQ ID NO: 597 - DNA, 25 bp, Artificial Sequence
  Synthetic
tttccttagtaaccacaggttgtgt

SEQ ID NO: 598 - DNA, 20 bp, Artificial Sequence
  Synthetic
cttagtaaccacaggttgtg

SEQ ID NO: 599 - DNA, 30 bp, Artificial Sequence
  Synthetic
tggcagtttccttagtaaccacaggttgtg

SEQ ID NO: 600 - DNA, 25 bp, Artificial Sequence
  Synthetic
gtttccttagtaaccacaggttgtg

SEQ ID NO: 601 - DNA, 20 bp, Artificial Sequence
  Synthetic
ccttagtaaccacaggttgt

SEQ ID NO: 602 - DNA, 30 bp, Artificial Sequence
  Synthetic
atggcagtttccttagtaaccacaggttgt

SEQ ID NO: 603 - DNA, 25 bp, Artificial Sequence
  Synthetic
agtttccttagtaaccacaggttgt

SEQ ID NO: 604 - DNA, 20 bp, Artificial Sequence
  Synthetic
tccttagtaaccacaggttg

SEQ ID NO: 605 - DNA, 30 bp, Artificial Sequence
  Synthetic
gatggcagtttccttagtaaccacaggttg

SEQ ID NO: 606 - DNA, 25 bp, Artificial Sequence
  Synthetic
cagtttccttagtaaccacaggttg

SEQ ID NO: 607 - DNA, 20 bp, Artificial Sequence
  Synthetic
ttccttagtaaccacaggtt

SEQ ID NO: 608 - DNA, 30 bp, Artificial Sequence
  Synthetic
agatggcagtttccttagtaaccacaggtt

SEQ ID NO: 609 - DNA, 25 bp, Artificial Sequence
  Synthetic
gcagtttccttagtaaccacaggtt

SEQ ID NO: 610 - DNA, 21 bp, Artificial Sequence
  Synthetic
tttccttagtaaccacaggtt

SEQ ID NO: 611 - DNA, 20 bp, Artificial Sequence
  Synthetic
tttccttagtaaccacaggt

SEQ ID NO: 612 - DNA, 30 bp, Artificial Sequence
  Synthetic
gagatggcagtttccttagtaaccacaggt

SEQ ID NO: 613 - DNA, 25 bp, Artificial Sequence
  Synthetic
ggcagtttccttagtaaccacaggt

SEQ ID NO: 614 - DNA, 19 bp, Artificial Sequence
  Synthetic
ttccttagtaaccacaggt

SEQ ID NO: 615 - DNA, 26 bp, Artificial Sequence
  Synthetic
tggcagtttccttagtaaccacaggt

SEQ ID NO: 616 - DNA, 20 bp, Artificial Sequence
  Synthetic
gtttccttagtaaccacagg

SEQ ID NO: 617 - DNA, 30 bp, Artificial Sequence
  Synthetic
ggagatggcagtttccttagtaaccacagg

SEQ ID NO: 618 - DNA, 25 bp, Artificial Sequence
  Synthetic
tggcagtttccttagtaaccacagg

SEQ ID NO: 619 - DNA, 20 bp, Artificial Sequence
  Synthetic
agtttccttagtaaccacag

SEQ ID NO: 620 - DNA, 30 bp, Artificial Sequence
  Synthetic
tggagatggcagtttccttagtaaccacag

SEQ ID NO: 621 - DNA, 25 bp, Artificial Sequence
  Synthetic
atggcagtttccttagtaaccacag

SEQ ID NO: 622 - DNA, 19 bp, Artificial Sequence
  Synthetic
gtttccttagtaaccacag

SEQ ID NO: 623 - DNA, 20 bp, Artificial Sequence
  Synthetic
cagtttccttagtaaccaca

SEQ ID NO: 624 - DNA, 30 bp, Artificial Sequence
  Synthetic
ttggagatggcagtttccttagtaaccaca

SEQ ID NO: 625 - DNA, 25 bp, Artificial Sequence
  Synthetic
gatggcagtttccttagtaaccaca

SEQ ID NO: 626 - DNA, 20 bp, Artificial Sequence
  Synthetic
gcagtttccttagtaaccac

SEQ ID NO: 627 - DNA, 30 bp, Artificial Sequence
  Synthetic
tttggagatggcagtttccttagtaaccac

SEQ ID NO: 628 - DNA, 25 bp, Artificial Sequence
  Synthetic
agatggcagtttccttagtaaccac

SEQ ID NO: 629 - DNA, 20 bp, Artificial Sequence
  Synthetic
ggcagtttccttagtaacca

SEQ ID NO: 630 - DNA, 30 bp, Artificial Sequence
  Synthetic
gtttggagatggcagtttccttagtaacca

SEQ ID NO: 631 - DNA, 25 bp, Artificial Sequence
  Synthetic
gagatggcagtttccttagtaacca

SEQ ID NO: 632 - DNA, 20 bp, Artificial Sequence
  Synthetic
tggcagtttccttagtaacc

SEQ ID NO: 633 - DNA, 30 bp, Artificial Sequence
  Synthetic
agtttggagatggcagtttccttagtaacc

SEQ ID NO: 634 - DNA, 23 bp, Artificial Sequence
  Synthetic
agatggcagtttccttagtaacc

SEQ ID NO: 635 - DNA, 25 bp, Artificial Sequence
  Synthetic
ggagatggcagtttccttagtaacc

SEQ ID NO: 636 - DNA, 24 bp, Artificial Sequence
  Synthetic
gagatggcagtttccttagtaacc

SEQ ID NO: 637 - DNA, 20 bp, Artificial Sequence
  Synthetic
atggcagtttccttagtaac

SEQ ID NO: 638 - DNA, 30 bp, Artificial Sequence
  Synthetic
tagtttggagatggcagtttccttagtaac

SEQ ID NO: 639 - DNA, 25 bp, Artificial Sequence
  Synthetic
tggagatggcagtttccttagtaac

SEQ ID NO: 640 - DNA, 19 bp, Artificial Sequence
  Synthetic
tggcagtttccttagtaac

SEQ ID NO: 641 - DNA, 20 bp, Artificial Sequence
  Synthetic
gatggcagtttccttagtaa

SEQ ID NO: 642 - DNA, 30 bp, Artificial Sequence
  Synthetic
ctagtttggagatggcagtttccttagtaa

SEQ ID NO: 643 - DNA, 25 bp, Artificial Sequence
  Synthetic
ttggagatggcagtttccttagtaa

SEQ ID NO: 644 - DNA, 28 bp, Artificial Sequence
  Synthetic
agtttggagatggcagtttccttagtaa

SEQ ID NO: 645 - DNA, 38 bp, Artificial Sequence
  Synthetic
tggcatttctagtttggagatggcagtttccttagtaa

SEQ ID NO: 646 - DNA, 20 bp, Artificial Sequence
  Synthetic
agatggcagtttccttagta

SEQ ID NO: 647 - DNA, 30 bp, Artificial Sequence
  Synthetic
tctagtttggagatggcagtttccttagta

SEQ ID NO: 648 - DNA, 25 bp, Artificial Sequence
  Synthetic
tttggagatggcagtttccttagta

SEQ ID NO: 649 - DNA, 21 bp, Artificial Sequence
  Synthetic
gagatggcagtttccttagta

SEQ ID NO: 650 - DNA, 20 bp, Artificial Sequence
  Synthetic
gagatggcagtttccttagt

SEQ ID NO: 651 - DNA, 30 bp, Artificial Sequence
  Synthetic
ttctagtttggagatggcagtttccttagt

SEQ ID NO: 652 - DNA, 25 bp, Artificial Sequence
  Synthetic
gtttggagatggcagtttccttagt

SEQ ID NO: 653 - DNA, 18 bp, Artificial Sequence
  Synthetic
gatggcagtttccttagt

SEQ ID NO: 654 - DNA, 31 bp, Artificial Sequence
  Synthetic
tttctagtttggagatggcagtttccttagt

SEQ ID NO: 655 - DNA, 20 bp, Artificial Sequence
  Synthetic
ggagatggcagtttccttag

SEQ ID NO: 656 - DNA, 30 bp, Artificial Sequence
  Synthetic
tttctagtttggagatggcagtttccttag

SEQ ID NO: 657 - DNA, 25 bp, Artificial Sequence
  Synthetic
agtttggagatggcagtttccttag

SEQ ID NO: 658 - DNA, 20 bp, Artificial Sequence
  Synthetic
tggagatggcagtttcctta

SEQ ID NO: 659 - DNA, 30 bp, Artificial Sequence
  Synthetic
atttctagtttggagatggcagtttcctta

SEQ ID NO: 660 - DNA, 25 bp, Artificial Sequence
  Synthetic
tagtttggagatggcagtttcctta

SEQ ID NO: 661 - DNA, 20 bp, Artificial Sequence
  Synthetic
ttggagatggcagtttcctt

SEQ ID NO: 662 - DNA, 30 bp, Artificial Sequence
  Synthetic
catttctagtttggagatggcagtttcctt

SEQ ID NO: 663 - DNA, 25 bp, Artificial Sequence
  Synthetic
ctagtttggagatggcagtttcctt

SEQ ID NO: 664 - DNA, 24 bp, Artificial Sequence
  Synthetic
tagtttggagatggcagtttcctt

SEQ ID NO: 665 - DNA, 20 bp, Artificial Sequence
  Synthetic
tttggagatggcagtttcct

SEQ ID NO: 666 - DNA, 30 bp, Artificial Sequence
  Synthetic
gcatttctagtttggagatggcagtttcct

SEQ ID NO: 667 - DNA, 25 bp, Artificial Sequence
  Synthetic
tctagtttggagatggcagtttcct

SEQ ID NO: 668 - DNA, 31 bp, Artificial Sequence
  Synthetic
ggcatttctagtttggagatggcagtttcct

SEQ ID NO: 669 - DNA, 20 bp, Artificial Sequence
  Synthetic
gtttggagatggcagtttcc

SEQ ID NO: 670 - DNA, 30 bp, Artificial Sequence
  Synthetic
ggcatttctagtttggagatggcagtttcc

SEQ ID NO: 671 - DNA, 25 bp, Artificial Sequence
  Synthetic
ttctagtttggagatggcagtttcc

SEQ ID NO: 672 - DNA, 43 bp, Artificial Sequence
  Synthetic
catcaaggaagatggcatttctagtttggagatggcagtttcc

SEQ ID NO: 673 - DNA, 20 bp, Artificial Sequence
  Synthetic
agtttggagatggcagtttc

SEQ ID NO: 674 - DNA, 30 bp, Artificial Sequence
  Synthetic
tggcatttctagtttggagatggcagtttc

SEQ ID NO: 675 - DNA, 25 bp, Artificial Sequence
  Synthetic
tttctagtttggagatggcagtttc

SEQ ID NO: 676 - DNA, 26 bp, Artificial Sequence
  Synthetic
atttctagtttggagatggcagtttc

SEQ ID NO: 677 - DNA, 20 bp, Artificial Sequence
  Synthetic
tagtttggagatggcagttt

SEQ ID NO: 678 - DNA, 30 bp, Artificial Sequence
  Synthetic
atggcatttctagtttggagatggcagttt

SEQ ID NO: 679 - DNA, 25 bp, Artificial Sequence
  Synthetic
atttctagtttggagatggcagttt

SEQ ID NO: 680 - DNA, 20 bp, Artificial Sequence
  Synthetic
ctagtttggagatggcagtt

SEQ ID NO: 681 - DNA, 30 bp, Artificial Sequence
  Synthetic
gatggcatttctagtttggagatggcagtt

SEQ ID NO: 682 - DNA, 25 bp, Artificial Sequence
  Synthetic
catttctagtttggagatggcagtt

SEQ ID NO: 683 - DNA, 18 bp, Artificial Sequence
  Synthetic
agtttggagatggcagtt

SEQ ID NO: 684 - DNA, 20 bp, Artificial Sequence
  Synthetic
tctagtttggagatggcagt

SEQ ID NO: 685 - DNA, 30 bp, Artificial Sequence
  Synthetic
agatggcatttctagtttggagatggcagt

SEQ ID NO: 686 - DNA, 25 bp, Artificial Sequence
  Synthetic
gcatttctagtttggagatggcagt

SEQ ID NO: 687 - DNA, 21 bp, Artificial Sequence
  Synthetic
ttctagtttggagatggcagt

SEQ ID NO: 688 - DNA, 20 bp, Artificial Sequence
  Synthetic
ttctagtttggagatggcag

SEQ ID NO: 689 - DNA, 30 bp, Artificial Sequence
  Synthetic
aagatggcatttctagtttggagatggcag

SEQ ID NO: 690 - DNA, 25 bp, Artificial Sequence
  Synthetic
ggcatttctagtttggagatggcag

SEQ ID NO: 691 - DNA, 26 bp, Artificial Sequence
  Synthetic
tggcatttctagtttggagatggcag

SEQ ID NO: 692 - DNA, 20 bp, Artificial Sequence
  Synthetic
tttctagtttggagatggca

SEQ ID NO: 693 - DNA, 30 bp, Artificial Sequence
  Synthetic
gaagatggcatttctagtttggagatggca

SEQ ID NO: 694 - DNA, 25 bp, Artificial Sequence
  Synthetic
tggcatttctagtttggagatggca

SEQ ID NO: 695 - DNA, 27 bp, Artificial Sequence
  Synthetic
gatggcatttctagtttggagatggca

SEQ ID NO: 696 - DNA, 20 bp, Artificial Sequence
  Synthetic
atttctagtttggagatggc

SEQ ID NO: 697 - DNA, 30 bp, Artificial Sequence
  Synthetic
ggaagatggcatttctagtttggagatggc

SEQ ID NO: 698 - DNA, 25 bp, Artificial Sequence
  Synthetic
atggcatttctagtttggagatggc

SEQ ID NO: 699 - DNA, 20 bp, Artificial Sequence
  Synthetic
catttctagtttggagatgg

SEQ ID NO: 700 - DNA, 30 bp, Artificial Sequence
  Synthetic
aggaagatggcatttctagtttggagatgg

SEQ ID NO: 701 - DNA, 25 bp, Artificial Sequence
  Synthetic
gatggcatttctagtttggagatgg

SEQ ID NO: 702 - DNA, 20 bp, Artificial Sequence
  Synthetic
gcatttctagtttggagatg

SEQ ID NO: 703 - DNA, 30 bp, Artificial Sequence
  Synthetic
aaggaagatggcatttctagtttggagatg

SEQ ID NO: 704 - DNA, 19 bp, Artificial Sequence
  Synthetic
catttctagtttggagatg

SEQ ID NO: 705 - DNA, 25 bp, Artificial Sequence
  Synthetic
agatggcatttctagtttggagatg

SEQ ID NO: 706 - DNA, 21 bp, Artificial Sequence
  Synthetic
ggcatttctagtttggagatg

SEQ ID NO: 707 - DNA, 20 bp, Artificial Sequence
  Synthetic
ggcatttctagtttggagat

SEQ ID NO: 708 - DNA, 30 bp, Artificial Sequence
  Synthetic
caaggaagatggcatttctagtttggagat

SEQ ID NO: 709 - DNA, 25 bp, Artificial Sequence
  Synthetic
aagatggcatttctagtttggagat

SEQ ID NO: 710 - DNA, 29 bp, Artificial Sequence
  Synthetic
aaggaagatggcatttctagtttggagat

SEQ ID NO: 711 - DNA, 20 bp, Artificial Sequence
  Synthetic
tggcatttctagtttggaga

SEQ ID NO: 712 - DNA, 30 bp, Artificial Sequence
  Synthetic
tcaaggaagatggcatttctagtttggaga

SEQ ID NO: 713 - DNA, 25 bp, Artificial Sequence
  Synthetic
gaagatggcatttctagtttggaga

SEQ ID NO: 714 - DNA, 20 bp, Artificial Sequence
  Synthetic
atggcatttctagtttggag

SEQ ID NO: 715 - DNA, 30 bp, Artificial Sequence
  Synthetic
atcaaggaagatggcatttctagtttggag

SEQ ID NO: 716 - DNA, 18 bp, Artificial Sequence
  Synthetic
ggcatttctagtttggag

SEQ ID NO: 717 - DNA, 25 bp, Artificial Sequence
  Synthetic
ggaagatggcatttctagtttggag

SEQ ID NO: 718 - DNA, 45 bp, Artificial Sequence
  Synthetic
gcaggtacctccaacatcaaggaagatggcatttctagtttggag

SEQ ID NO: 719 - DNA, 20 bp, Artificial Sequence
  Synthetic
gatggcatttctagtttgga

SEQ ID NO: 720 - DNA, 30 bp, Artificial Sequence
  Synthetic
catcaaggaagatggcatttctagtttgga

SEQ ID NO: 721 - DNA, 25 bp, Artificial Sequence
  Synthetic
aggaagatggcatttctagtttgga

SEQ ID NO: 722 - DNA, 20 bp, Artificial Sequence
  Synthetic
agatggcatttctagtttgg

SEQ ID NO: 723 - DNA, 30 bp, Artificial Sequence
  Synthetic
acatcaaggaagatggcatttctagtttgg

SEQ ID NO: 724 - DNA, 25 bp, Artificial Sequence
  Synthetic
aaggaagatggcatttctagtttgg

SEQ ID NO: 725 - DNA, 18 bp, Artificial Sequence
  Synthetic
atggcatttctagtttgg

SEQ ID NO: 726 - DNA, 21 bp, Artificial Sequence
  Synthetic
aagatggcatttctagtttgg

SEQ ID NO: 727 - DNA, 22 bp, Artificial Sequence
  Synthetic
gaagatggcatttctagtttgg

SEQ ID NO: 728 - DNA, 23 bp, Artificial Sequence
  Synthetic
ggaagatggcatttctagtttgg

SEQ ID NO: 729 - DNA, 29 bp, Artificial Sequence
  Synthetic
catcaaggaagatggcatttctagtttgg

SEQ ID NO: 730 - DNA, 20 bp, Artificial Sequence
  Synthetic
aagatggcatttctagtttg

SEQ ID NO: 731 - DNA, 30 bp, Artificial Sequence
  Synthetic
aacatcaaggaagatggcatttctagtttg

SEQ ID NO: 732 - DNA, 25 bp, Artificial Sequence
  Synthetic
caaggaagatggcatttctagtttg

SEQ ID NO: 733 - DNA, 42 bp, Artificial Sequence
  Synthetic
gcaggtacctccaacatcaaggaagatggcatttctagtttg

SEQ ID NO: 734 - DNA, 25 bp, Artificial Sequence
  Synthetic
tcaaggaagatggcatttctagttt

SEQ ID NO: 735 - DNA, 30 bp, Artificial Sequence
  Synthetic
caacatcaaggaagatggcatttctagttt

SEQ ID NO: 736 - DNA, 20 bp, Artificial Sequence
  Synthetic
gaagatggcatttctagttt

SEQ ID NO: 737 - DNA, 40 bp, Artificial Sequence
  Synthetic
gcaggtacctccaacatcaaggaagatggcatttctagtt

SEQ ID NO: 738 - DNA, 18 bp, Artificial Sequence
  Synthetic
aagatggcatttctagtt

SEQ ID NO: 739 - DNA, 25 bp, Artificial Sequence
  Synthetic
atcaaggaagatggcatttctagtt

SEQ ID NO: 740 - DNA, 20 bp, Artificial Sequence
  Synthetic
ggaagatggcatttctagtt

SEQ ID NO: 741 - DNA, 26 bp, Artificial Sequence
  Synthetic
catcaaggaagatggcatttctagtt

SEQ ID NO: 742 - DNA, 30 bp, Artificial Sequence
  Synthetic
ccaacatcaaggaagatggcatttctagtt

SEQ ID NO: 743 - DNA, 30 bp, Artificial Sequence
  Synthetic
tccaacatcaaggaagatggcatttctagt

SEQ ID NO: 744 - DNA, 42 bp, Artificial Sequence
  Synthetic
agagcaggtacctccaacatcaaggaagatggcatttctagt

SEQ ID NO: 745 - DNA, 30 bp, Artificial Sequence
  Synthetic
ctccaacatcaaggaagatggcatttctag

SEQ ID NO: 746 - DNA, 30 bp, Artificial Sequence
  Synthetic
cctccaacatcaaggaagatggcatttcta

SEQ ID NO: 747 - DNA, 30 bp, Artificial Sequence
  Synthetic
acctccaacatcaaggaagatggcatttct

SEQ ID NO: 748 - DNA, 35 bp, Artificial Sequence
  Synthetic
caggtacctccaacatcaaggaagatggcatttct

SEQ ID NO: 749 - DNA, 28 bp, Artificial Sequence
  Synthetic
ctccaacatcaaggaagatggcatttct

SEQ ID NO: 750 - DNA, 30 bp, Artificial Sequence
  Synthetic
tacctccaacatcaaggaagatggcatttc

SEQ ID NO: 751 - DNA, 31 bp, Artificial Sequence
  Synthetic
gtacctccaacatcaaggaagatggcatttc

SEQ ID NO: 752 - DNA, 28 bp, Artificial Sequence
  Synthetic
cctccaacatcaaggaagatggcatttc

SEQ ID NO: 753 - DNA, 30 bp, Artificial Sequence
  Synthetic
gtacctccaacatcaaggaagatggcattt

SEQ ID NO: 754 - DNA, 30 bp, Artificial Sequence
  Synthetic
ggtacctccaacatcaaggaagatggcatt

SEQ ID NO: 755 - DNA, 29 bp, Artificial Sequence
  Synthetic
gtacctccaacatcaaggaagatggcatt

SEQ ID NO: 756 - DNA, 25 bp, Artificial Sequence
  Synthetic
ctccaacatcaaggaagatggcatt

SEQ ID NO: 757 - DNA, 30 bp, Artificial Sequence
  Synthetic
aggtacctccaacatcaaggaagatggcat

SEQ ID NO: 758 - DNA, 28 bp, Artificial Sequence
  Synthetic
gtacctccaacatcaaggaagatggcat

SEQ ID NO: 759 - DNA, 25 bp, Artificial Sequence
  Synthetic
cctccaacatcaaggaagatggcat

SEQ ID NO: 760 - DNA, 30 bp, Artificial Sequence
  Synthetic
caggtacctccaacatcaaggaagatggca

SEQ ID NO: 761 - DNA, 25 bp, Artificial Sequence
  Synthetic
acctccaacatcaaggaagatggca

SEQ ID NO: 762 - DNA, 26 bp, Artificial Sequence
  Synthetic
tacctccaacatcaaggaagatggca

SEQ ID NO: 763 - DNA, 27 bp, Artificial Sequence
  Synthetic
gtacctccaacatcaaggaagatggca

SEQ ID NO: 764 - DNA, 30 bp, Artificial Sequence
  Synthetic
gcaggtacctccaacatcaaggaagatggc

SEQ ID NO: 765 - DNA, 25 bp, Artificial Sequence
  Synthetic
tacctccaacatcaaggaagatggc

SEQ ID NO: 766 - DNA, 26 bp, Artificial Sequence
  Synthetic
gtacctccaacatcaaggaagatggc

SEQ ID NO: 767 - DNA, 27 bp, Artificial Sequence
  Synthetic
ggtacctccaacatcaaggaagatggc

SEQ ID NO: 768 - DNA, 29 bp, Artificial Sequence
  Synthetic
caggtacctccaacatcaaggaagatggc

SEQ ID NO: 769 - DNA, 28 bp, Artificial Sequence
  Synthetic
aggtacctccaacatcaaggaagatggc

SEQ ID NO: 770 - DNA, 24 bp, Artificial Sequence
  Synthetic
acctccaacatcaaggaagatggc

SEQ ID NO: 771 - DNA, 23 bp, Artificial Sequence
  Synthetic
cctccaacatcaaggaagatggc

SEQ ID NO: 772 - DNA, 30 bp, Artificial Sequence
  Synthetic
agcaggtacctccaacatcaaggaagatgg

SEQ ID NO: 773 - DNA, 27 bp, Artificial Sequence
  Synthetic
aggtacctccaacatcaaggaagatgg

SEQ ID NO: 774 - DNA, 25 bp, Artificial Sequence
  Synthetic
gtacctccaacatcaaggaagatgg

SEQ ID NO: 775 - DNA, 26 bp, Artificial Sequence
  Synthetic
ggtacctccaacatcaaggaagatgg

SEQ ID NO: 776 - DNA, 21 bp, Artificial Sequence
  Synthetic
ctccaacatcaaggaagatgg

SEQ ID NO: 777 - DNA, 22 bp, Artificial Sequence
  Synthetic
cctccaacatcaaggaagatgg

SEQ ID NO: 778 - DNA, 30 bp, Artificial Sequence
  Synthetic
gagcaggtacctccaacatcaaggaagatg

SEQ ID NO: 779 - DNA, 25 bp, Artificial Sequence
  Synthetic
ggtacctccaacatcaaggaagatg

SEQ ID NO: 780 - DNA, 29 bp, Artificial Sequence
  Synthetic
agcaggtacctccaacatcaaggaagatg

SEQ ID NO: 781 - DNA, 24 bp, Artificial Sequence
  Synthetic
gtacctccaacatcaaggaagatg

SEQ ID NO: 782 - DNA, 21 bp, Artificial Sequence
  Synthetic
cctccaacatcaaggaagatg

SEQ ID NO: 783 - DNA, 20 bp, Artificial Sequence
  Synthetic
ctccaacatcaaggaagatg

SEQ ID NO: 784 - DNA, 30 bp, Artificial Sequence
  Synthetic
agagcaggtacctccaacatcaaggaagat

SEQ ID NO: 785 - DNA, 25 bp, Artificial Sequence
  Synthetic
aggtacctccaacatcaaggaagat

SEQ ID NO: 786 - DNA, 21 bp, Artificial Sequence
  Synthetic
acctccaacatcaaggaagat

SEQ ID NO: 787 - DNA, 23 bp, Artificial Sequence
  Synthetic
gtacctccaacatcaaggaagat

SEQ ID NO: 788 - DNA, 20 bp, Artificial Sequence
  Synthetic
cctccaacatcaaggaagat

SEQ ID NO: 789 - DNA, 20 bp, Artificial Sequence
  Synthetic
acctccaacatcaaggaaga

SEQ ID NO: 790 - DNA, 30 bp, Artificial Sequence
  Synthetic
cagagcaggtacctccaacatcaaggaaga

SEQ ID NO: 791 - DNA, 25 bp, Artificial Sequence
  Synthetic
caggtacctccaacatcaaggaaga

SEQ ID NO: 792 - DNA, 22 bp, Artificial Sequence
  Synthetic
gtacctccaacatcaaggaaga

SEQ ID NO: 793 - DNA, 18 bp, Artificial Sequence
  Synthetic
ctccaacatcaaggaaga

SEQ ID NO: 794 - DNA, 20 bp, Artificial Sequence
  Synthetic
tacctccaacatcaaggaag

SEQ ID NO: 795 - DNA, 30 bp, Artificial Sequence
  Synthetic
ccagagcaggtacctccaacatcaaggaag

SEQ ID NO: 796 - DNA, 25 bp, Artificial Sequence
  Synthetic
gcaggtacctccaacatcaaggaag

SEQ ID NO: 797 - DNA, 27 bp, Artificial Sequence
  Synthetic
gagcaggtacctccaacatcaaggaag

SEQ ID NO: 798 - DNA, 29 bp, Artificial Sequence
  Synthetic
cagagcaggtacctccaacatcaaggaag

SEQ ID NO: 799 - DNA, 21 bp, Artificial Sequence
  Synthetic
gtacctccaacatcaaggaag

SEQ ID NO: 800 - DNA, 20 bp, Artificial Sequence
  Synthetic
gtacctccaacatcaaggaa

SEQ ID NO: 801 - DNA, 30 bp, Artificial Sequence
  Synthetic
gccagagcaggtacctccaacatcaaggaa

SEQ ID NO: 802 - DNA, 25 bp, Artificial Sequence
  Synthetic
agcaggtacctccaacatcaaggaa

SEQ ID NO: 803 - DNA, 26 bp, Artificial Sequence
  Synthetic
gagcaggtacctccaacatcaaggaa

SEQ ID NO: 804 - DNA, 20 bp, Artificial Sequence
  Synthetic
ggtacctccaacatcaagga

SEQ ID NO: 805 - DNA, 30 bp, Artificial Sequence
  Synthetic
tgccagagcaggtacctccaacatcaagga

SEQ ID NO: 806 - DNA, 25 bp, Artificial Sequence
  Synthetic
gagcaggtacctccaacatcaagga

SEQ ID NO: 807 - DNA, 21 bp, Artificial Sequence
  Synthetic
aggtacctccaacatcaagga

SEQ ID NO: 808 - DNA, 20 bp, Artificial Sequence
  Synthetic
aggtacctccaacatcaagg

SEQ ID NO: 809 - DNA, 30 bp, Artificial Sequence
  Synthetic
ctgccagagcaggtacctccaacatcaagg

SEQ ID NO: 810 - DNA, 25 bp, Artificial Sequence
  Synthetic
agagcaggtacctccaacatcaagg

SEQ ID NO: 811 - DNA, 22 bp, Artificial Sequence
  Synthetic
gcaggtacctccaacatcaagg

SEQ ID NO: 812 - DNA, 24 bp, Artificial Sequence
  Synthetic
gagcaggtacctccaacatcaagg

SEQ ID NO: 813 - DNA, 26 bp, Artificial Sequence
  Synthetic
cagagcaggtacctccaacatcaagg

SEQ ID NO: 814 - DNA, 28 bp, Artificial Sequence
  Synthetic
gccagagcaggtacctccaacatcaagg

SEQ ID NO: 815 - DNA, 20 bp, Artificial Sequence
  Synthetic
caggtacctccaacatcaag

SEQ ID NO: 816 - DNA, 30 bp, Artificial Sequence
  Synthetic
tctgccagagcaggtacctccaacatcaag

SEQ ID NO: 817 - DNA, 25 bp, Artificial Sequence
  Synthetic
cagagcaggtacctccaacatcaag

SEQ ID NO: 818 - DNA, 29 bp, Artificial Sequence
  Synthetic
ctgccagagcaggtacctccaacatcaag

SEQ ID NO: 819 - DNA, 23 bp, Artificial Sequence
  Synthetic
gagcaggtacctccaacatcaag

SEQ ID NO: 820 - DNA, 20 bp, Artificial Sequence
  Synthetic
gcaggtacctccaacatcaa

SEQ ID NO: 821 - DNA, 30 bp, Artificial Sequence
  Synthetic
atctgccagagcaggtacctccaacatcaa

SEQ ID NO: 822 - DNA, 25 bp, Artificial Sequence
  Synthetic
ccagagcaggtacctccaacatcaa

SEQ ID NO: 823 - DNA, 20 bp, Artificial Sequence
  Synthetic
agcaggtacctccaacatca

SEQ ID NO: 824 - DNA, 30 bp, Artificial Sequence
  Synthetic
aatctgccagagcaggtacctccaacatca

SEQ ID NO: 825 - DNA, 25 bp, Artificial Sequence
  Synthetic
gccagagcaggtacctccaacatca

SEQ ID NO: 826 - DNA, 20 bp, Artificial Sequence
  Synthetic
gagcaggtacctccaacatc

SEQ ID NO: 827 - DNA, 30 bp, Artificial Sequence
  Synthetic
aaatctgccagagcaggtacctccaacatc

SEQ ID NO: 828 - DNA, 23 bp, Artificial Sequence
  Synthetic
ccagagcaggtacctccaacatc

SEQ ID NO: 829 - DNA, 24 bp, Artificial Sequence
  Synthetic
gccagagcaggtacctccaacatc

SEQ ID NO: 830 - DNA, 25 bp, Artificial Sequence
  Synthetic
tgccagagcaggtacctccaacatc

SEQ ID NO: 831 - DNA, 20 bp, Artificial Sequence
  Synthetic
agagcaggtacctccaacat

SEQ ID NO: 832 - DNA, 30 bp, Artificial Sequence
  Synthetic
gaaatctgccagagcaggtacctccaacat

SEQ ID NO: 833 - DNA, 25 bp, Artificial Sequence
  Synthetic
ctgccagagcaggtacctccaacat

SEQ ID NO: 834 - DNA, 20 bp, Artificial Sequence
  Synthetic
cagagcaggtacctccaaca

SEQ ID NO: 835 - DNA, 30 bp, Artificial Sequence
  Synthetic
tgaaatctgccagagcaggtacctccaaca

SEQ ID NO: 836 - DNA, 25 bp, Artificial Sequence
  Synthetic
tctgccagagcaggtacctccaaca

SEQ ID NO: 837 - DNA, 20 bp, Artificial Sequence
  Synthetic
ccagagcaggtacctccaac

SEQ ID NO: 838 - DNA, 30 bp, Artificial Sequence
  Synthetic
ttgaaatctgccagagcaggtacctccaac

SEQ ID NO: 839 - DNA, 25 bp, Artificial Sequence
  Synthetic
atctgccagagcaggtacctccaac

SEQ ID NO: 840 - DNA, 20 bp, Artificial Sequence
  Synthetic
gccagagcaggtacctccaa

SEQ ID NO: 841 - DNA, 30 bp, Artificial Sequence
  Synthetic
gttgaaatctgccagagcaggtacctccaa

SEQ ID NO: 842 - DNA, 27 bp, Artificial Sequence
  Synthetic
gaaatctgccagagcaggtacctccaa

SEQ ID NO: 843 - DNA, 25 bp, Artificial Sequence
  Synthetic
aatctgccagagcaggtacctccaa

SEQ ID NO: 844 - DNA, 20 bp, Artificial Sequence
  Synthetic
tgccagagcaggtacctcca

SEQ ID NO: 845 - DNA, 30 bp, Artificial Sequence
  Synthetic
ggttgaaatctgccagagcaggtacctcca

SEQ ID NO: 846 - DNA, 21 bp, Artificial Sequence
  Synthetic
ctgccagagcaggtacctcca

SEQ ID NO: 847 - DNA, 25 bp, Artificial Sequence
  Synthetic
aaatctgccagagcaggtacctcca

SEQ ID NO: 848 - DNA, 18 bp, Artificial Sequence
  Synthetic
ccagagcaggtacctcca

SEQ ID NO: 849 - DNA, 20 bp, Artificial Sequence
  Synthetic
ctgccagagcaggtacctcc

SEQ ID NO: 850 - DNA, 30 bp, Artificial Sequence
  Synthetic
cggttgaaatctgccagagcaggtacctcc

SEQ ID NO: 851 - DNA, 25 bp, Artificial Sequence
  Synthetic
gaaatctgccagagcaggtacctcc

SEQ ID NO: 852 - DNA, 20 bp, Artificial Sequence
  Synthetic
tctgccagagcaggtacctc

SEQ ID NO: 853 - DNA, 30 bp, Artificial Sequence
  Synthetic
ccggttgaaatctgccagagcaggtacctc

SEQ ID NO: 854 - DNA, 25 bp, Artificial Sequence
  Synthetic
tgaaatctgccagagcaggtacctc

SEQ ID NO: 855 - DNA, 24 bp, Artificial Sequence
  Synthetic
gaaatctgccagagcaggtacctc

SEQ ID NO: 856 - DNA, 20 bp, Artificial Sequence
  Synthetic
atctgccagagcaggtacct

SEQ ID NO: 857 - DNA, 30 bp, Artificial Sequence
  Synthetic
cccggttgaaatctgccagagcaggtacct

SEQ ID NO: 858 - DNA, 25 bp, Artificial Sequence
  Synthetic
ttgaaatctgccagagcaggtacct

SEQ ID NO: 859 - DNA, 20 bp, Artificial Sequence
  Synthetic
aatctgccagagcaggtacc

SEQ ID NO: 860 - DNA, 30 bp, Artificial Sequence
  Synthetic
gcccggttgaaatctgccagagcaggtacc

SEQ ID NO: 861 - DNA, 25 bp, Artificial Sequence
  Synthetic
gttgaaatctgccagagcaggtacc

SEQ ID NO: 862 - DNA, 30 bp, Artificial Sequence
  Synthetic
agcccggttgaaatctgccagagcaggtac

SEQ ID NO: 863 - DNA, 26 bp, Artificial Sequence
  Synthetic
cggttgaaatctgccagagcaggtac

SEQ ID NO: 864 - DNA, 25 bp, Artificial Sequence
  Synthetic
ggttgaaatctgccagagcaggtac

SEQ ID NO: 865 - DNA, 30 bp, Artificial Sequence
  Synthetic
aagcccggttgaaatctgccagagcaggta

SEQ ID NO: 866 - DNA, 25 bp, Artificial Sequence
  Synthetic
cggttgaaatctgccagagcaggta

SEQ ID NO: 867 - DNA, 30 bp, Artificial Sequence
  Synthetic
caagcccggttgaaatctgccagagcaggt

SEQ ID NO: 868 - DNA, 25 bp, Artificial Sequence
  Synthetic
ccggttgaaatctgccagagcaggt

SEQ ID NO: 869 - DNA, 20 bp, Artificial Sequence
  Synthetic
ttgaaatctgccagagcagg

SEQ ID NO: 870 - DNA, 30 bp, Artificial Sequence
  Synthetic
ccaagcccggttgaaatctgccagagcagg

SEQ ID NO: 871 - DNA, 25 bp, Artificial Sequence
  Synthetic
cccggttgaaatctgccagagcagg

SEQ ID NO: 872 - DNA, 20 bp, Artificial Sequence
  Synthetic
gttgaaatctgccagagcag

SEQ ID NO: 873 - DNA, 30 bp, Artificial Sequence
  Synthetic
tccaagcccggttgaaatctgccagagcag

SEQ ID NO: 874 - DNA, 25 bp, Artificial Sequence
  Synthetic
gcccggttgaaatctgccagagcag

SEQ ID NO: 875 - DNA, 20 bp, Artificial Sequence
  Synthetic
ggttgaaatctgccagagca

SEQ ID NO: 876 - DNA, 30 bp, Artificial Sequence
  Synthetic
gtccaagcccggttgaaatctgccagagca

SEQ ID NO: 877 - DNA, 21 bp, Artificial Sequence
  Synthetic
cggttgaaatctgccagagca

SEQ ID NO: 878 - DNA, 25 bp, Artificial Sequence
  Synthetic
agcccggttgaaatctgccagagca

SEQ ID NO: 879 - DNA, 20 bp, Artificial Sequence
  Synthetic
cggttgaaatctgccagagc

SEQ ID NO: 880 - DNA, 30 bp, Artificial Sequence
  Synthetic
tgtccaagcccggttgaaatctgccagagc

SEQ ID NO: 881 - DNA, 25 bp, Artificial Sequence
  Synthetic
aagcccggttgaaatctgccagagc

SEQ ID NO: 882 - DNA, 20 bp, Artificial Sequence
  Synthetic
ccggttgaaatctgccagag

SEQ ID NO: 883 - DNA, 30 bp, Artificial Sequence
  Synthetic
ctgtccaagcccggttgaaatctgccagag

SEQ ID NO: 884 - DNA, 35 bp, Artificial Sequence
  Synthetic
aagttctgtccaagcccggttgaaatctgccagag

SEQ ID NO: 885 - DNA, 29 bp, Artificial Sequence
  Synthetic
tgtccaagcccggttgaaatctgccagag

SEQ ID NO: 886 - DNA, 25 bp, Artificial Sequence
  Synthetic
caagcccggttgaaatctgccagag

SEQ ID NO: 887 - DNA, 20 bp, Artificial Sequence
  Synthetic
cccggttgaaatctgccaga

SEQ ID NO: 888 - DNA, 30 bp, Artificial Sequence
  Synthetic
tctgtccaagcccggttgaaatctgccaga

SEQ ID NO: 889 - DNA, 25 bp, Artificial Sequence
  Synthetic
ccaagcccggttgaaatctgccaga

SEQ ID NO: 890 - DNA, 20 bp, Artificial Sequence
  Synthetic
gcccggttgaaatctgccag

SEQ ID NO: 891 - DNA, 30 bp, Artificial Sequence
  Synthetic
ttctgtccaagcccggttgaaatctgccag

SEQ ID NO: 892 - DNA, 25 bp, Artificial Sequence
  Synthetic
tccaagcccggttgaaatctgccag

SEQ ID NO: 893 - DNA, 20 bp, Artificial Sequence
  Synthetic
agcccggttgaaatctgcca

SEQ ID NO: 894 - DNA, 30 bp, Artificial Sequence
  Synthetic
gttctgtccaagcccggttgaaatctgcca

SEQ ID NO: 895 - DNA, 25 bp, Artificial Sequence
  Synthetic
gtccaagcccggttgaaatctgcca

SEQ ID NO: 896 - DNA, 20 bp, Artificial Sequence
  Synthetic
aagcccggttgaaatctgcc

SEQ ID NO: 897 - DNA, 30 bp, Artificial Sequence
  Synthetic
agttctgtccaagcccggttgaaatctgcc

SEQ ID NO: 898 - DNA, 25 bp, Artificial Sequence
  Synthetic
tgtccaagcccggttgaaatctgcc

SEQ ID NO: 899 - DNA, 20 bp, Artificial Sequence
  Synthetic
caagcccggttgaaatctgc

SEQ ID NO: 900 - DNA, 30 bp, Artificial Sequence
  Synthetic
aagttctgtccaagcccggttgaaatctgc

SEQ ID NO: 901 - DNA, 25 bp, Artificial Sequence
  Synthetic
ctgtccaagcccggttgaaatctgc

SEQ ID NO: 902 - DNA, 20 bp, Artificial Sequence
  Synthetic
ccaagcccggttgaaatctg

SEQ ID NO: 903 - DNA, 30 bp, Artificial Sequence
  Synthetic
taagttctgtccaagcccggttgaaatctg

SEQ ID NO: 904 - DNA, 25 bp, Artificial Sequence
  Synthetic
tctgtccaagcccggttgaaatctg

SEQ ID NO: 905 - DNA, 20 bp, Artificial Sequence
  Synthetic
tccaagcccggttgaaatct

SEQ ID NO: 906 - DNA, 30 bp, Artificial Sequence
  Synthetic
gtaagttctgtccaagcccggttgaaatct

SEQ ID NO: 907 - DNA, 25 bp, Artificial Sequence
  Synthetic
ttctgtccaagcccggttgaaatct

SEQ ID NO: 908 - DNA, 33 bp, Artificial Sequence
  Synthetic
tcggtaagttctgtccaagcccggttgaaatct

SEQ ID NO: 909 - DNA, 20 bp, Artificial Sequence
  Synthetic
gtccaagcccggttgaaatc

SEQ ID NO: 910 - DNA, 30 bp, Artificial Sequence
  Synthetic
ggtaagttctgtccaagcccggttgaaatc

SEQ ID NO: 911 - DNA, 24 bp, Artificial Sequence
  Synthetic
ttctgtccaagcccggttgaaatc

SEQ ID NO: 912 - DNA, 21 bp, Artificial Sequence
  Synthetic
tgtccaagcccggttgaaatc

SEQ ID NO: 913 - DNA, 25 bp, Artificial Sequence
  Synthetic
gttctgtccaagcccggttgaaatc

SEQ ID NO: 914 - DNA, 20 bp, Artificial Sequence
  Synthetic
tgtccaagcccggttgaaat

SEQ ID NO: 915 - DNA, 30 bp, Artificial Sequence
  Synthetic
cggtaagttctgtccaagcccggttgaaat

SEQ ID NO: 916 - DNA, 25 bp, Artificial Sequence
  Synthetic
agttctgtccaagcccggttgaaat

SEQ ID NO: 917 - DNA, 26 bp, Artificial Sequence
  Synthetic
aagttctgtccaagcccggttgaaat

SEQ ID NO: 918 - DNA, 20 bp, Artificial Sequence
  Synthetic
ctgtccaagcccggttgaaa

SEQ ID NO: 919 - DNA, 30 bp, Artificial Sequence
  Synthetic
tcggtaagttctgtccaagcccggttgaaa

SEQ ID NO: 920 - DNA, 25 bp, Artificial Sequence
  Synthetic
aagttctgtccaagcccggttgaaa

SEQ ID NO: 921 - DNA, 20 bp, Artificial Sequence
  Synthetic
tctgtccaagcccggttgaa

SEQ ID NO: 922 - DNA, 30 bp, Artificial Sequence
  Synthetic
gtcggtaagttctgtccaagcccggttgaa

SEQ ID NO: 923 - DNA, 25 bp, Artificial Sequence
  Synthetic
taagttctgtccaagcccggttgaa

SEQ ID NO: 924 - DNA, 20 bp, Artificial Sequence
  Synthetic
ttctgtccaagcccggttga

SEQ ID NO: 925 - DNA, 30 bp, Artificial Sequence
  Synthetic
agtcggtaagttctgtccaagcccggttga

SEQ ID NO: 926 - DNA, 25 bp, Artificial Sequence
  Synthetic
gtaagttctgtccaagcccggttga

SEQ ID NO: 927 - DNA, 20 bp, Artificial Sequence
  Synthetic
gttctgtccaagcccggttg

SEQ ID NO: 928 - DNA, 30 bp, Artificial Sequence
  Synthetic
cagtcggtaagttctgtccaagcccggttg

SEQ ID NO: 929 - DNA, 25 bp, Artificial Sequence
  Synthetic
ggtaagttctgtccaagcccggttg

SEQ ID NO: 930 - DNA, 22 bp, Artificial Sequence
  Synthetic
aagttctgtccaagcccggttg

SEQ ID NO: 931 - DNA, 20 bp, Artificial Sequence
  Synthetic
agttctgtccaagcccggtt

SEQ ID NO: 932 - DNA, 30 bp, Artificial Sequence
  Synthetic
ccagtcggtaagttctgtccaagcccggtt

SEQ ID NO: 933 - DNA, 25 bp, Artificial Sequence
  Synthetic
cggtaagttctgtccaagcccggtt

SEQ ID NO: 934 - DNA, 24 bp, Artificial Sequence
  Synthetic
ggtaagttctgtccaagcccggtt

SEQ ID NO: 935 - DNA, 20 bp, Artificial Sequence
  Synthetic
aagttctgtccaagcccggt

SEQ ID NO: 936 - DNA, 30 bp, Artificial Sequence
  Synthetic
gccagtcggtaagttctgtccaagcccggt

SEQ ID NO: 937 - DNA, 25 bp, Artificial Sequence
  Synthetic
tcggtaagttctgtccaagcccggt

SEQ ID NO: 938 - DNA, 20 bp, Artificial Sequence
  Synthetic
taagttctgtccaagcccgg

SEQ ID NO: 939 - DNA, 30 bp, Artificial Sequence
  Synthetic
agccagtcggtaagttctgtccaagcccgg

SEQ ID NO: 940 - DNA, 25 bp, Artificial Sequence
  Synthetic
gtcggtaagttctgtccaagcccgg

SEQ ID NO: 941 - DNA, 20 bp, Artificial Sequence
  Synthetic
gtaagttctgtccaagcccg

SEQ ID NO: 942 - DNA, 30 bp, Artificial Sequence
  Synthetic
aagccagtcggtaagttctgtccaagcccg

SEQ ID NO: 943 - DNA, 25 bp, Artificial Sequence
  Synthetic
agtcggtaagttctgtccaagcccg

SEQ ID NO: 944 - DNA, 20 bp, Artificial Sequence
  Synthetic
ggtaagttctgtccaagccc

SEQ ID NO: 945 - DNA, 30 bp, Artificial Sequence
  Synthetic
aaagccagtcggtaagttctgtccaagccc

SEQ ID NO: 946 - DNA, 21 bp, Artificial Sequence
  Synthetic
cggtaagttctgtccaagccc

SEQ ID NO: 947 - DNA, 25 bp, Artificial Sequence
  Synthetic
cagtcggtaagttctgtccaagccc

SEQ ID NO: 948 - DNA, 20 bp, Artificial Sequence
  Synthetic
cggtaagttctgtccaagcc

SEQ ID NO: 949 - DNA, 30 bp, Artificial Sequence
  Synthetic
gaaagccagtcggtaagttctgtccaagcc

SEQ ID NO: 950 - DNA, 25 bp, Artificial Sequence
  Synthetic
ccagtcggtaagttctgtccaagcc

SEQ ID NO: 951 - DNA, 20 bp, Artificial Sequence
  Synthetic
tcggtaagttctgtccaagc

SEQ ID NO: 952 - DNA, 30 bp, Artificial Sequence
  Synthetic
agaaagccagtcggtaagttctgtccaagc

SEQ ID NO: 953 - DNA, 18 bp, Artificial Sequence
  Synthetic
ggtaagttctgtccaagc

SEQ ID NO: 954 - DNA, 25 bp, Artificial Sequence
  Synthetic
gccagtcggtaagttctgtccaagc

SEQ ID NO: 955 - DNA, 20 bp, Artificial Sequence
  Synthetic
gtcggtaagttctgtccaag

SEQ ID NO: 956 - DNA, 30 bp, Artificial Sequence
  Synthetic
gagaaagccagtcggtaagttctgtccaag

SEQ ID NO: 957 - DNA, 23 bp, Artificial Sequence
  Synthetic
ccagtcggtaagttctgtccaag

SEQ ID NO: 958 - DNA, 25 bp, Artificial Sequence
  Synthetic
agccagtcggtaagttctgtccaag

SEQ ID NO: 959 - DNA, 20 bp, Artificial Sequence
  Synthetic
agtcggtaagttctgtccaa

SEQ ID NO: 960 - DNA, 30 bp, Artificial Sequence
  Synthetic
agagaaagccagtcggtaagttctgtccaa

SEQ ID NO: 961 - DNA, 25 bp, Artificial Sequence
  Synthetic
aagccagtcggtaagttctgtccaa

SEQ ID NO: 962 - DNA, 19 bp, Artificial Sequence
  Synthetic
gtcggtaagttctgtccaa

SEQ ID NO: 963 - DNA, 20 bp, Artificial Sequence
  Synthetic
cagtcggtaagttctgtcca

SEQ ID NO: 964 - DNA, 30 bp, Artificial Sequence
  Synthetic
cagagaaagccagtcggtaagttctgtcca

SEQ ID NO: 965 - DNA, 25 bp, Artificial Sequence
  Synthetic
aaagccagtcggtaagttctgtcca

SEQ ID NO: 966 - DNA, 21 bp, Artificial Sequence
  Synthetic
ccagtcggtaagttctgtcca

SEQ ID NO: 967 - DNA, 20 bp, Artificial Sequence
  Synthetic
ccagtcggtaagttctgtcc

SEQ ID NO: 968 - DNA, 30 bp, Artificial Sequence
  Synthetic
gcagagaaagccagtcggtaagttctgtcc

SEQ ID NO: 969 - DNA, 25 bp, Artificial Sequence
  Synthetic
gaaagccagtcggtaagttctgtcc

SEQ ID NO: 970 - DNA, 20 bp, Artificial Sequence
  Synthetic
gccagtcggtaagttctgtc

SEQ ID NO: 971 - DNA, 30 bp, Artificial Sequence
  Synthetic
agcagagaaagccagtcggtaagttctgtc

SEQ ID NO: 972 - DNA, 26 bp, Artificial Sequence
  Synthetic
gagaaagccagtcggtaagttctgtc

SEQ ID NO: 973 - DNA, 25 bp, Artificial Sequence
  Synthetic
agaaagccagtcggtaagttctgtc

SEQ ID NO: 974 - DNA, 20 bp, Artificial Sequence
  Synthetic
agccagtcggtaagttctgt

SEQ ID NO: 975 - DNA, 30 bp, Artificial Sequence
  Synthetic
aagcagagaaagccagtcggtaagttctgt

SEQ ID NO: 976 - DNA, 25 bp, Artificial Sequence
  Synthetic
gagaaagccagtcggtaagttctgt

SEQ ID NO: 977 - DNA, 20 bp, Artificial Sequence
  Synthetic
aagccagtcggtaagttctg

SEQ ID NO: 978 - DNA, 30 bp, Artificial Sequence
  Synthetic
caagcagagaaagccagtcggtaagttctg

SEQ ID NO: 979 - DNA, 25 bp, Artificial Sequence
  Synthetic
agagaaagccagtcggtaagttctg

SEQ ID NO: 980 - DNA, 20 bp, Artificial Sequence
  Synthetic
aaagccagtcggtaagttct

SEQ ID NO: 981 - DNA, 30 bp, Artificial Sequence
  Synthetic
tcaagcagagaaagccagtcggtaagttct

SEQ ID NO: 982 - DNA, 18 bp, Artificial Sequence
  Synthetic
agccagtcggtaagttct

SEQ ID NO: 983 - DNA, 21 bp, Artificial Sequence
  Synthetic
gaaagccagtcggtaagttct

SEQ ID NO: 984 - DNA, 25 bp, Artificial Sequence
  Synthetic
cagagaaagccagtcggtaagttct

SEQ ID NO: 985 - DNA, 20 bp, Artificial Sequence
  Synthetic
gaaagccagtcggtaagttc

SEQ ID NO: 986 - DNA, 30 bp, Artificial Sequence
  Synthetic
atcaagcagagaaagccagtcggtaagttc

SEQ ID NO: 987 - DNA, 23 bp, Artificial Sequence
  Synthetic
agagaaagccagtcggtaagttc

SEQ ID NO: 988 - DNA, 25 bp, Artificial Sequence
  Synthetic
gcagagaaagccagtcggtaagttc

SEQ ID NO: 989 - DNA, 20 bp, Artificial Sequence
  Synthetic
agaaagccagtcggtaagtt

SEQ ID NO: 990 - DNA, 30 bp, Artificial Sequence
  Synthetic
gatcaagcagagaaagccagtcggtaagtt

SEQ ID NO: 991 - DNA, 25 bp, Artificial Sequence
  Synthetic
agcagagaaagccagtcggtaagtt

SEQ ID NO: 992 - DNA, 20 bp, Artificial Sequence
  Synthetic
gagaaagccagtcggtaagt

SEQ ID NO: 993 - DNA, 30 bp, Artificial Sequence
  Synthetic
tgatcaagcagagaaagccagtcggtaagt

SEQ ID NO: 994 - DNA, 25 bp, Artificial Sequence
  Synthetic
aagcagagaaagccagtcggtaagt

SEQ ID NO: 995 - DNA, 20 bp, Artificial Sequence
  Synthetic
agagaaagccagtcggtaag

SEQ ID NO: 996 - DNA, 30 bp, Artificial Sequence
  Synthetic
ttgatcaagcagagaaagccagtcggtaag

SEQ ID NO: 997 - DNA, 25 bp, Artificial Sequence
  Synthetic
caagcagagaaagccagtcggtaag

SEQ ID NO: 998 - DNA, 20 bp, Artificial Sequence
  Synthetic
cagagaaagccagtcggtaa

SEQ ID NO: 999 - DNA, 30 bp, Artificial Sequence
  Synthetic
cttgatcaagcagagaaagccagtcggtaa

SEQ ID NO: 1000 - DNA, 25 bp, Artificial Sequence
  Synthetic
tcaagcagagaaagccagtcggtaa

SEQ ID NO: 1001 - DNA, 21 bp, Artificial Sequence
  Synthetic
gcagagaaagccagtcggtaa

SEQ ID NO: 1002 - DNA, 20 bp, Artificial Sequence
  Synthetic
gcagagaaagccagtcggta

SEQ ID NO: 1003 - DNA, 30 bp, Artificial Sequence
  Synthetic
acttgatcaagcagagaaagccagtcggta

SEQ ID NO: 1004 - DNA, 25 bp, Artificial Sequence
  Synthetic
atcaagcagagaaagccagtcggta

SEQ ID NO: 1005 - DNA, 20 bp, Artificial Sequence
  Synthetic
agcagagaaagccagtcggt

SEQ ID NO: 1006 - DNA, 30 bp, Artificial Sequence
  Synthetic
aacttgatcaagcagagaaagccagtcggt

SEQ ID NO: 1007 - DNA, 25 bp, Artificial Sequence
  Synthetic
gatcaagcagagaaagccagtcggt

SEQ ID NO: 1008 - DNA, 20 bp, Artificial Sequence
  Synthetic
aagcagagaaagccagtcgg

SEQ ID NO: 1009 - DNA, 30 bp, Artificial Sequence
  Synthetic
taacttgatcaagcagagaaagccagtcgg

SEQ ID NO: 1010 - DNA, 45 bp, Artificial Sequence
  Synthetic
ccctctgtgattttataacttgatcaagcagagaaagccagtcgg

SEQ ID NO: 1011 - DNA, 25 bp, Artificial Sequence
  Synthetic
tgatcaagcagagaaagccagtcgg

SEQ ID NO: 1012 - DNA, 20 bp, Artificial Sequence
  Synthetic
caagcagagaaagccagtcg

SEQ ID NO: 1013 - DNA, 30 bp, Artificial Sequence
  Synthetic
ataacttgatcaagcagagaaagccagtcg

SEQ ID NO: 1014 - DNA, 25 bp, Artificial Sequence
  Synthetic
ttgatcaagcagagaaagccagtcg

SEQ ID NO: 1015 - DNA, 20 bp, Artificial Sequence
  Synthetic
tcaagcagagaaagccagtc

SEQ ID NO: 1016 - DNA, 30 bp, Artificial Sequence
  Synthetic
tataacttgatcaagcagagaaagccagtc

SEQ ID NO: 1017 - DNA, 25 bp, Artificial Sequence
  Synthetic
cttgatcaagcagagaaagccagtc

SEQ ID NO: 1018 - DNA, 21 bp, Artificial Sequence
  Synthetic
atcaagcagagaaagccagtc

SEQ ID NO: 1019 - DNA, 20 bp, Artificial Sequence
  Synthetic
atcaagcagagaaagccagt

SEQ ID NO: 1020 - DNA, 30 bp, Artificial Sequence
  Synthetic
ttataacttgatcaagcagagaaagccagt

SEQ ID NO: 1021 - DNA, 25 bp, Artificial Sequence
  Synthetic
acttgatcaagcagagaaagccagt

SEQ ID NO: 1022 - DNA, 20 bp, Artificial Sequence
  Synthetic
gatcaagcagagaaagccag

SEQ ID NO: 1023 - DNA, 30 bp, Artificial Sequence
  Synthetic
tttataacttgatcaagcagagaaagccag

SEQ ID NO: 1024 - DNA, 23 bp, Artificial Sequence
  Synthetic
cttgatcaagcagagaaagccag

SEQ ID NO: 1025 - DNA, 25 bp, Artificial Sequence
  Synthetic
aacttgatcaagcagagaaagccag

SEQ ID NO: 1026 - DNA, 20 bp, Artificial Sequence
  Synthetic
tgatcaagcagagaaagcca

SEQ ID NO: 1027 - DNA, 30 bp, Artificial Sequence
  Synthetic
ttttataacttgatcaagcagagaaagcca

SEQ ID NO: 1028 - DNA, 26 bp, Artificial Sequence
  Synthetic
ataacttgatcaagcagagaaagcca

SEQ ID NO: 1029 - DNA, 25 bp, Artificial Sequence
  Synthetic
taacttgatcaagcagagaaagcca

SEQ ID NO: 1030 - DNA, 20 bp, Artificial Sequence
  Synthetic
ttgatcaagcagagaaagcc

SEQ ID NO: 1031 - DNA, 30 bp, Artificial Sequence
  Synthetic
attttataacttgatcaagcagagaaagcc

SEQ ID NO: 1032 - DNA, 25 bp, Artificial Sequence
  Synthetic
ataacttgatcaagcagagaaagcc

SEQ ID NO: 1033 - DNA, 20 bp, Artificial Sequence
  Synthetic
cttgatcaagcagagaaagc

SEQ ID NO: 1034 - DNA, 30 bp, Artificial Sequence
  Synthetic
gattttataacttgatcaagcagagaaagc

SEQ ID NO: 1035 - DNA, 25 bp, Artificial Sequence
  Synthetic
tataacttgatcaagcagagaaagc

SEQ ID NO: 1036 - DNA, 20 bp, Artificial Sequence
  Synthetic
acttgatcaagcagagaaag

SEQ ID NO: 1037 - DNA, 30 bp, Artificial Sequence
  Synthetic
tgattttataacttgatcaagcagagaaag

SEQ ID NO: 1038 - DNA, 25 bp, Artificial Sequence
  Synthetic
ttataacttgatcaagcagagaaag

SEQ ID NO: 1039 - DNA, 20 bp, Artificial Sequence
  Synthetic
aacttgatcaagcagagaaa

SEQ ID NO: 1040 - DNA, 30 bp, Artificial Sequence
  Synthetic
gtgattttataacttgatcaagcagagaaa

SEQ ID NO: 1041 - DNA, 25 bp, Artificial Sequence
  Synthetic
tttataacttgatcaagcagagaaa

SEQ ID NO: 1042 - DNA, 20 bp, Artificial Sequence
  Synthetic
taacttgatcaagcagagaa

SEQ ID NO: 1043 - DNA, 30 bp, Artificial Sequence
  Synthetic
tgtgattttataacttgatcaagcagagaa

SEQ ID NO: 1044 - DNA, 25 bp, Artificial Sequence
  Synthetic
ttttataacttgatcaagcagagaa

SEQ ID NO: 1045 - DNA, 20 bp, Artificial Sequence
  Synthetic
ataacttgatcaagcagaga

SEQ ID NO: 1046 - DNA, 30 bp, Artificial Sequence
  Synthetic
ctgtgattttataacttgatcaagcagaga

SEQ ID NO: 1047 - DNA, 25 bp, Artificial Sequence
  Synthetic
attttataacttgatcaagcagaga

SEQ ID NO: 1048 - DNA, 30 bp, Artificial Sequence
  Synthetic
tctgtgattttataacttgatcaagcagag

SEQ ID NO: 1049 - DNA, 30 bp, Artificial Sequence
  Synthetic
ctctgtgattttataacttgatcaagcaga

SEQ ID NO: 1050 - DNA, 30 bp, Artificial Sequence
  Synthetic
cctctgtgattttataacttgatcaagcag

SEQ ID NO: 1051 - DNA, 30 bp, Artificial Sequence
  Synthetic
ccctctgtgattttataacttgatcaagca

SEQ ID NO: 1052 - DNA, 30 bp, Artificial Sequence
  Synthetic
accctctgtgattttataacttgatcaagc

SEQ ID NO: 1053 - DNA, 30 bp, Artificial Sequence
  Synthetic
caccctctgtgattttataacttgatcaag

SEQ ID NO: 1054 - DNA, 25 bp, Artificial Sequence
  Synthetic
tctgtgattttataacttgatcaag

SEQ ID NO: 1055 - DNA, 30 bp, Artificial Sequence
  Synthetic
tcaccctctgtgattttataacttgatcaa

SEQ ID NO: 1056 - DNA, 25 bp, Artificial Sequence
  Synthetic
ctctgtgattttataacttgatcaa

SEQ ID NO: 1057 - DNA, 30 bp, Artificial Sequence
  Synthetic
atcaccctctgtgattttataacttgatca

SEQ ID NO: 1058 - DNA, 25 bp, Artificial Sequence
  Synthetic
cctctgtgattttataacttgatca

SEQ ID NO: 1059 - DNA, 30 bp, Artificial Sequence
  Synthetic
catcaccctctgtgattttataacttgatc

SEQ ID NO: 1060 - DNA, 25 bp, Artificial Sequence
  Synthetic
ccctctgtgattttataacttgatc

SEQ ID NO: 1061 - DNA, 30 bp, Artificial Sequence
  Synthetic
ccatcaccctctgtgattttataacttgat

SEQ ID NO: 1062 - DNA, 23 bp, Artificial Sequence
  Synthetic
cctctgtgattttataacttgat

SEQ ID NO: 1063 - DNA, 26 bp, Artificial Sequence
  Synthetic
caccctctgtgattttataacttgat

SEQ ID NO: 1064 - DNA, 25 bp, Artificial Sequence
  Synthetic
accctctgtgattttataacttgat

SEQ ID NO: 1065 - DNA, 20 bp, Artificial Sequence
  Synthetic
tctgtgattttataacttga

SEQ ID NO: 1066 - DNA, 30 bp, Artificial Sequence
  Synthetic
accatcaccctctgtgattttataacttga

SEQ ID NO: 1067 - DNA, 21 bp, Artificial Sequence
  Synthetic
ctctgtgattttataacttga

SEQ ID NO: 1068 - DNA, 25 bp, Artificial Sequence
  Synthetic
caccctctgtgattttataacttga

SEQ ID NO: 1069 - DNA, 20 bp, Artificial Sequence
  Synthetic
ctctgtgattttataacttg

SEQ ID NO: 1070 - DNA, 30 bp, Artificial Sequence
  Synthetic
caccatcaccctctgtgattttataacttg

SEQ ID NO: 1071 - DNA, 21 bp, Artificial Sequence
  Synthetic
cctctgtgattttataacttg

SEQ ID NO: 1072 - DNA, 25 bp, Artificial Sequence
  Synthetic
tcaccctctgtgattttataacttg

SEQ ID NO: 1073 - DNA, 20 bp, Artificial Sequence
  Synthetic
cctctgtgattttataactt

SEQ ID NO: 1074 - DNA, 30 bp, Artificial Sequence
  Synthetic
ccaccatcaccctctgtgattttataactt

SEQ ID NO: 1075 - DNA, 23 bp, Artificial Sequence
  Synthetic
caccctctgtgattttataactt

SEQ ID NO: 1076 - DNA, 25 bp, Artificial Sequence
  Synthetic
atcaccctctgtgattttataactt

SEQ ID NO: 1077 - DNA, 20 bp, Artificial Sequence
  Synthetic
ccctctgtgattttataact

SEQ ID NO: 1078 - DNA, 30 bp, Artificial Sequence
  Synthetic
cccaccatcaccctctgtgattttataact

SEQ ID NO: 1079 - DNA, 25 bp, Artificial Sequence
  Synthetic
catcaccctctgtgattttataact

SEQ ID NO: 1080 - DNA, 20 bp, Artificial Sequence
  Synthetic
accctctgtgattttataac

SEQ ID NO: 1081 - DNA, 30 bp, Artificial Sequence
  Synthetic
acccaccatcaccctctgtgattttataac

SEQ ID NO: 1082 - DNA, 25 bp, Artificial Sequence
  Synthetic
ccatcaccctctgtgattttataac

SEQ ID NO: 1083 - DNA, 20 bp, Artificial Sequence
  Synthetic
caccctctgtgattttataa

SEQ ID NO: 1084 - DNA, 30 bp, Artificial Sequence
  Synthetic
cacccaccatcaccctctgtgattttataa

SEQ ID NO: 1085 - DNA, 25 bp, Artificial Sequence
  Synthetic
accatcaccctctgtgattttataa

SEQ ID NO: 1086 - DNA, 20 bp, Artificial Sequence
  Synthetic
tcaccctctgtgattttata

SEQ ID NO: 1087 - DNA, 30 bp, Artificial Sequence
  Synthetic
tcacccaccatcaccctctgtgattttata

SEQ ID NO: 1088 - DNA, 25 bp, Artificial Sequence
  Synthetic
caccatcaccctctgtgattttata

SEQ ID NO: 1089 - DNA, 20 bp, Artificial Sequence
  Synthetic
atcaccctctgtgattttat

SEQ ID NO: 1090 - DNA, 30 bp, Artificial Sequence
  Synthetic
gtcacccaccatcaccctctgtgattttat

SEQ ID NO: 1091 - DNA, 40 bp, Artificial Sequence
  Synthetic
tatcctcaaggtcacccaccatcaccctctgtgattttat

SEQ ID NO: 1092 - DNA, 19 bp, Artificial Sequence
  Synthetic
tcaccctctgtgattttat

SEQ ID NO: 1093 - DNA, 25 bp, Artificial Sequence
  Synthetic
ccaccatcaccctctgtgattttat

SEQ ID NO: 1094 - DNA, 20 bp, Artificial Sequence
  Synthetic
catcaccctctgtgatttta

SEQ ID NO: 1095 - DNA, 30 bp, Artificial Sequence
  Synthetic
ggtcacccaccatcaccctctgtgatttta

SEQ ID NO: 1096 - DNA, 25 bp, Artificial Sequence
  Synthetic
cccaccatcaccctctgtgatttta

SEQ ID NO: 1097 - DNA, 20 bp, Artificial Sequence
  Synthetic
ccatcaccctctgtgatttt

SEQ ID NO: 1098 - DNA, 30 bp, Artificial Sequence
  Synthetic
aggtcacccaccatcaccctctgtgatttt

SEQ ID NO: 1099 - DNA, 25 bp, Artificial Sequence
  Synthetic
acccaccatcaccctctgtgatttt

SEQ ID NO: 1100 - DNA, 20 bp, Artificial Sequence
  Synthetic
accatcaccctctgtgattt

SEQ ID NO: 1101 - DNA, 30 bp, Artificial Sequence
  Synthetic
aaggtcacccaccatcaccctctgtgattt

SEQ ID NO: 1102 - DNA, 21 bp, Artificial Sequence
  Synthetic
caccatcaccctctgtgattt

SEQ ID NO: 1103 - DNA, 25 bp, Artificial Sequence
  Synthetic
cacccaccatcaccctctgtgattt

SEQ ID NO: 1104 - DNA, 20 bp, Artificial Sequence
  Synthetic
caccatcaccctctgtgatt

SEQ ID NO: 1105 - DNA, 30 bp, Artificial Sequence
  Synthetic
caaggtcacccaccatcaccctctgtgatt

SEQ ID NO: 1106 - DNA, 25 bp, Artificial Sequence
  Synthetic
tcacccaccatcaccctctgtgatt

SEQ ID NO: 1107 - DNA, 20 bp, Artificial Sequence
  Synthetic
ccaccatcaccctctgtgat

SEQ ID NO: 1108 - DNA, 30 bp, Artificial Sequence
  Synthetic
tcaaggtcacccaccatcaccctctgtgat

SEQ ID NO: 1109 - DNA, 25 bp, Artificial Sequence
  Synthetic
gtcacccaccatcaccctctgtgat

SEQ ID NO: 1110 - DNA, 20 bp, Artificial Sequence
  Synthetic
cccaccatcaccctctgtga

SEQ ID NO: 1111 - DNA, 30 bp, Artificial Sequence
  Synthetic
ctcaaggtcacccaccatcaccctctgtga

SEQ ID NO: 1112 - DNA, 25 bp, Artificial Sequence
  Synthetic
ggtcacccaccatcaccctctgtga

SEQ ID NO: 1113 - DNA, 20 bp, Artificial Sequence
  Synthetic
acccaccatcaccctctgtg

SEQ ID NO: 1114 - DNA, 30 bp, Artificial Sequence
  Synthetic
cctcaaggtcacccaccatcaccctctgtg

SEQ ID NO: 1115 - DNA, 21 bp, Artificial Sequence
  Synthetic
cacccaccatcaccctctgtg

SEQ ID NO: 1116 - DNA, 25 bp, Artificial Sequence
  Synthetic
aggtcacccaccatcaccctctgtg

SEQ ID NO: 1117 - DNA, 20 bp, Artificial Sequence
  Synthetic
cacccaccatcaccctctgt

SEQ ID NO: 1118 - DNA, 30 bp, Artificial Sequence
  Synthetic
tcctcaaggtcacccaccatcaccctctgt

SEQ ID NO: 1119 - DNA, 25 bp, Artificial Sequence
  Synthetic
aaggtcacccaccatcaccctctgt

SEQ ID NO: 1120 - DNA, 33 bp, Artificial Sequence
  Synthetic
atatcctcaaggtcacccaccatcaccctctgt

SEQ ID NO: 1121 - DNA, 26 bp, Artificial Sequence
  Synthetic
caaggtcacccaccatcaccctctgt

SEQ ID NO: 1122 - DNA, 20 bp, Artificial Sequence
  Synthetic
tcacccaccatcaccctctg

SEQ ID NO: 1123 - DNA, 30 bp, Artificial Sequence
  Synthetic
atcctcaaggtcacccaccatcaccctctg

SEQ ID NO: 1124 - DNA, 25 bp, Artificial Sequence
  Synthetic
caaggtcacccaccatcaccctctg

SEQ ID NO: 1125 - DNA, 30 bp, Artificial Sequence
  Synthetic
tatcctcaaggtcacccaccatcaccctct

SEQ ID NO: 1126 - DNA, 30 bp, Artificial Sequence
  Synthetic
atatcctcaaggtcacccaccatcaccctc

SEQ ID NO: 1127 - DNA, 30 bp, Artificial Sequence
  Synthetic
gatatcctcaaggtcacccaccatcaccct

SEQ ID NO: 1128 - DNA, 25 bp, Artificial Sequence
  Synthetic
cctcaaggtcacccaccatcaccct

SEQ ID NO: 1129 - DNA, 30 bp, Artificial Sequence
  Synthetic
tgatatcctcaaggtcacccaccatcaccc

SEQ ID NO: 1130 - DNA, 25 bp, Artificial Sequence
  Synthetic
tcctcaaggtcacccaccatcaccc

SEQ ID NO: 1131 - DNA, 30 bp, Artificial Sequence
  Synthetic
ttgatatcctcaaggtcacccaccatcacc

SEQ ID NO: 1132 - DNA, 25 bp, Artificial Sequence
  Synthetic
atcctcaaggtcacccaccatcacc

SEQ ID NO: 1133 - DNA, 30 bp, Artificial Sequence
  Synthetic
gttgatatcctcaaggtcacccaccatcac

SEQ ID NO: 1134 - DNA, 25 bp, Artificial Sequence
  Synthetic
tatcctcaaggtcacccaccatcac

SEQ ID NO: 1135 - DNA, 30 bp, Artificial Sequence
  Synthetic
cgttgatatcctcaaggtcacccaccatca

SEQ ID NO: 1136 - DNA, 25 bp, Artificial Sequence
  Synthetic
atatcctcaaggtcacccaccatca

SEQ ID NO: 1137 - DNA, 20 bp, Artificial Sequence
  Synthetic
cctcaaggtcacccaccatc

SEQ ID NO: 1138 - DNA, 30 bp, Artificial Sequence
  Synthetic
tcgttgatatcctcaaggtcacccaccatc

SEQ ID NO: 1139 - DNA, 25 bp, Artificial Sequence
  Synthetic
gatatcctcaaggtcacccaccatc

SEQ ID NO: 1140 - DNA, 20 bp, Artificial Sequence
  Synthetic
tcctcaaggtcacccaccat

SEQ ID NO: 1141 - DNA, 30 bp, Artificial Sequence
  Synthetic
ctcgttgatatcctcaaggtcacccaccat

SEQ ID NO: 1142 - DNA, 25 bp, Artificial Sequence
  Synthetic
tgatatcctcaaggtcacccaccat

SEQ ID NO: 1143 - DNA, 20 bp, Artificial Sequence
  Synthetic
atcctcaaggtcacccacca

SEQ ID NO: 1144 - DNA, 30 bp, Artificial Sequence
  Synthetic
tctcgttgatatcctcaaggtcacccacca

SEQ ID NO: 1145 - DNA, 25 bp, Artificial Sequence
  Synthetic
ttgatatcctcaaggtcacccacca

SEQ ID NO: 1146 - DNA, 20 bp, Artificial Sequence
  Synthetic
tatcctcaaggtcacccacc

SEQ ID NO: 1147 - DNA, 30 bp, Artificial Sequence
  Synthetic
atctcgttgatatcctcaaggtcacccacc

SEQ ID NO: 1148 - DNA, 19 bp, Artificial Sequence
  Synthetic
atcctcaaggtcacccacc

SEQ ID NO: 1149 - DNA, 23 bp, Artificial Sequence
  Synthetic
tgatatcctcaaggtcacccacc

SEQ ID NO: 1150 - DNA, 25 bp, Artificial Sequence
  Synthetic
gttgatatcctcaaggtcacccacc

SEQ ID NO: 1151 - DNA, 20 bp, Artificial Sequence
  Synthetic
atatcctcaaggtcacccac

SEQ ID NO: 1152 - DNA, 30 bp, Artificial Sequence
  Synthetic
catctcgttgatatcctcaaggtcacccac

SEQ ID NO: 1153 - DNA, 25 bp, Artificial Sequence
  Synthetic
cgttgatatcctcaaggtcacccac

SEQ ID NO: 1154 - DNA, 20 bp, Artificial Sequence
  Synthetic
gatatcctcaaggtcaccca

SEQ ID NO: 1155 - DNA, 30 bp, Artificial Sequence
  Synthetic
tcatctcgttgatatcctcaaggtcaccca

SEQ ID NO: 1156 - DNA, 25 bp, Artificial Sequence
  Synthetic
tcgttgatatcctcaaggtcaccca

SEQ ID NO: 1157 - DNA, 20 bp, Artificial Sequence
  Synthetic
tgatatcctcaaggtcaccc

SEQ ID NO: 1158 - DNA, 30 bp, Artificial Sequence
  Synthetic
atcatctcgttgatatcctcaaggtcaccc

SEQ ID NO: 1159 - DNA, 21 bp, Artificial Sequence
  Synthetic
ttgatatcctcaaggtcaccc

SEQ ID NO: 1160 - DNA, 25 bp, Artificial Sequence
  Synthetic
ctcgttgatatcctcaaggtcaccc

SEQ ID NO: 1161 - DNA, 20 bp, Artificial Sequence
  Synthetic
ttgatatcctcaaggtcacc

SEQ ID NO: 1162 - DNA, 30 bp, Artificial Sequence
  Synthetic
gatcatctcgttgatatcctcaaggtcacc

SEQ ID NO: 1163 - DNA, 19 bp, Artificial Sequence
  Synthetic
tgatatcctcaaggtcacc

SEQ ID NO: 1164 - DNA, 26 bp, Artificial Sequence
  Synthetic
atctcgttgatatcctcaaggtcacc

SEQ ID NO: 1165 - DNA, 25 bp, Artificial Sequence
  Synthetic
tctcgttgatatcctcaaggtcacc

SEQ ID NO: 1166 - DNA, 20 bp, Artificial Sequence
  Synthetic
gttgatatcctcaaggtcac

SEQ ID NO: 1167 - DNA, 30 bp, Artificial Sequence
  Synthetic
tgatcatctcgttgatatcctcaaggtcac

SEQ ID NO: 1168 - DNA, 25 bp, Artificial Sequence
  Synthetic
atctcgttgatatcctcaaggtcac

SEQ ID NO: 1169 - DNA, 20 bp, Artificial Sequence
  Synthetic
cgttgatatcctcaaggtca

SEQ ID NO: 1170 - DNA, 30 bp, Artificial Sequence
  Synthetic
atgatcatctcgttgatatcctcaaggtca

SEQ ID NO: 1171 - DNA, 34 bp, Artificial Sequence
  Synthetic
cttgatgatcatctcgttgatatcctcaaggtca

SEQ ID NO: 1172 - DNA, 37 bp, Artificial Sequence
  Synthetic
ctgcttgatgatcatctcgttgatatcctcaaggtca

SEQ ID NO: 1173 - DNA, 25 bp, Artificial Sequence
  Synthetic
catctcgttgatatcctcaaggtca

SEQ ID NO: 1174 - DNA, 20 bp, Artificial Sequence
  Synthetic
tcgttgatatcctcaaggtc

SEQ ID NO: 1175 - DNA, 30 bp, Artificial Sequence
  Synthetic
gatgatcatctcgttgatatcctcaaggtc

SEQ ID NO: 1176 - DNA, 25 bp, Artificial Sequence
  Synthetic
tcatctcgttgatatcctcaaggtc

SEQ ID NO: 1177 - DNA, 20 bp, Artificial Sequence
  Synthetic
ctcgttgatatcctcaaggt

SEQ ID NO: 1178 - DNA, 30 bp, Artificial Sequence
  Synthetic
tgatgatcatctcgttgatatcctcaaggt

SEQ ID NO: 1179 - DNA, 25 bp, Artificial Sequence
  Synthetic
atcatctcgttgatatcctcaaggt

SEQ ID NO: 1180 - DNA, 20 bp, Artificial Sequence
  Synthetic
tctcgttgatatcctcaagg

SEQ ID NO: 1181 - DNA, 30 bp, Artificial Sequence
  Synthetic
ttgatgatcatctcgttgatatcctcaagg

SEQ ID NO: 1182 - DNA, 25 bp, Artificial Sequence
  Synthetic
gatcatctcgttgatatcctcaagg

SEQ ID NO: 1183 - DNA, 20 bp, Artificial Sequence
  Synthetic
atctcgttgatatcctcaag

SEQ ID NO: 1184 - DNA, 30 bp, Artificial Sequence
  Synthetic
cttgatgatcatctcgttgatatcctcaag

SEQ ID NO: 1185 - DNA, 25 bp, Artificial Sequence
  Synthetic
tgatcatctcgttgatatcctcaag

SEQ ID NO: 1186 - DNA, 20 bp, Artificial Sequence
  Synthetic
catctcgttgatatcctcaa

SEQ ID NO: 1187 - DNA, 30 bp, Artificial Sequence
  Synthetic
gcttgatgatcatctcgttgatatcctcaa

SEQ ID NO: 1188 - DNA, 33 bp, Artificial Sequence
  Synthetic
tctgcttgatgatcatctcgttgatatcctcaa

SEQ ID NO: 1189 - DNA, 22 bp, Artificial Sequence
  Synthetic
atcatctcgttgatatcctcaa

SEQ ID NO: 1190 - DNA, 25 bp, Artificial Sequence
  Synthetic
atgatcatctcgttgatatcctcaa

SEQ ID NO: 1191 - DNA, 20 bp, Artificial Sequence
  Synthetic
tcatctcgttgatatcctca

SEQ ID NO: 1192 - DNA, 30 bp, Artificial Sequence
  Synthetic
tgcttgatgatcatctcgttgatatcctca

SEQ ID NO: 1193 - DNA, 25 bp, Artificial Sequence
  Synthetic
gatgatcatctcgttgatatcctca

SEQ ID NO: 1194 - DNA, 20 bp, Artificial Sequence
  Synthetic
atcatctcgttgatatcctc

SEQ ID NO: 1195 - DNA, 30 bp, Artificial Sequence
  Synthetic
ctgcttgatgatcatctcgttgatatcctc

SEQ ID NO: 1196 - DNA, 21 bp, Artificial Sequence
  Synthetic
gatcatctcgttgatatcctc

SEQ ID NO: 1197 - DNA, 25 bp, Artificial Sequence
  Synthetic
tgatgatcatctcgttgatatcctc

SEQ ID NO: 1198 - DNA, 20 bp, Artificial Sequence
  Synthetic
gatcatctcgttgatatcct

SEQ ID NO: 1199 - DNA, 30 bp, Artificial Sequence
  Synthetic
tctgcttgatgatcatctcgttgatatcct

SEQ ID NO: 1200 - DNA, 25 bp, Artificial Sequence
  Synthetic
ttgatgatcatctcgttgatatcct

SEQ ID NO: 1201 - DNA, 20 bp, Artificial Sequence
  Synthetic
tgatcatctcgttgatatcc

SEQ ID NO: 1202 - DNA, 30 bp, Artificial Sequence
  Synthetic
ttctgcttgatgatcatctcgttgatatcc

SEQ ID NO: 1203 - DNA, 25 bp, Artificial Sequence
  Synthetic
cttgatgatcatctcgttgatatcc

SEQ ID NO: 1204 - DNA, 20 bp, Artificial Sequence
  Synthetic
atgatcatctcgttgatatc

SEQ ID NO: 1205 - DNA, 30 bp, Artificial Sequence
  Synthetic
cttctgcttgatgatcatctcgttgatatc

SEQ ID NO: 1206 - DNA, 25 bp, Artificial Sequence
  Synthetic
gcttgatgatcatctcgttgatatc

SEQ ID NO: 1207 - DNA, 20 bp, Artificial Sequence
  Synthetic
gatgatcatctcgttgatat

SEQ ID NO: 1208 - DNA, 30 bp, Artificial Sequence
  Synthetic
ccttctgcttgatgatcatctcgttgatat

SEQ ID NO: 1209 - DNA, 27 bp, Artificial Sequence
  Synthetic
tctgcttgatgatcatctcgttgatat

SEQ ID NO: 1210 - DNA, 29 bp, Artificial Sequence
  Synthetic
cttctgcttgatgatcatctcgttgatat

SEQ ID NO: 1211 - DNA, 25 bp, Artificial Sequence
  Synthetic
tgcttgatgatcatctcgttgatat

SEQ ID NO: 1212 - DNA, 20 bp, Artificial Sequence
  Synthetic
tgatgatcatctcgttgata

SEQ ID NO: 1213 - DNA, 30 bp, Artificial Sequence
  Synthetic
accttctgcttgatgatcatctcgttgata

SEQ ID NO: 1214 - DNA, 25 bp, Artificial Sequence
  Synthetic
ctgcttgatgatcatctcgttgata

SEQ ID NO: 1215 - DNA, 20 bp, Artificial Sequence
  Synthetic
ttgatgatcatctcgttgat

SEQ ID NO: 1216 - DNA, 30 bp, Artificial Sequence
  Synthetic
taccttctgcttgatgatcatctcgttgat

SEQ ID NO: 1217 - DNA, 25 bp, Artificial Sequence
  Synthetic
tctgcttgatgatcatctcgttgat

SEQ ID NO: 1218 - DNA, 20 bp, Artificial Sequence
  Synthetic
cttgatgatcatctcgttga

SEQ ID NO: 1219 - DNA, 30 bp, Artificial Sequence
  Synthetic
ataccttctgcttgatgatcatctcgttga

SEQ ID NO: 1220 - DNA, 26 bp, Artificial Sequence
  Synthetic
cttctgcttgatgatcatctcgttga

SEQ ID NO: 1221 - DNA, 25 bp, Artificial Sequence
  Synthetic
ttctgcttgatgatcatctcgttga

SEQ ID NO: 1222 - DNA, 20 bp, Artificial Sequence
  Synthetic
gcttgatgatcatctcgttg

SEQ ID NO: 1223 - DNA, 30 bp, Artificial Sequence
  Synthetic
cataccttctgcttgatgatcatctcgttg

SEQ ID NO: 1224 - DNA, 22 bp, Artificial Sequence
  Synthetic
ctgcttgatgatcatctcgttg

SEQ ID NO: 1225 - DNA, 26 bp, Artificial Sequence
  Synthetic
ccttctgcttgatgatcatctcgttg

SEQ ID NO: 1226 - DNA, 25 bp, Artificial Sequence
  Synthetic
cttctgcttgatgatcatctcgttg

SEQ ID NO: 1227 - DNA, 20 bp, Artificial Sequence
  Synthetic
tgcttgatgatcatctcgtt

SEQ ID NO: 1228 - DNA, 30 bp, Artificial Sequence
  Synthetic
tcataccttctgcttgatgatcatctcgtt

SEQ ID NO: 1229 - DNA, 21 bp, Artificial Sequence
  Synthetic
ctgcttgatgatcatctcgtt

SEQ ID NO: 1230 - DNA, 20 bp, Artificial Sequence
  Synthetic
ctgcttgatgatcatctcgt

SEQ ID NO: 1231 - DNA, 30 bp, Artificial Sequence
  Synthetic
ctcataccttctgcttgatgatcatctcgt

SEQ ID NO: 1232 - DNA, 21 bp, Artificial Sequence
  Synthetic
tctgcttgatgatcatctcgt

SEQ ID NO: 1233 - DNA, 25 bp, Artificial Sequence
  Synthetic
accttctgcttgatgatcatctcgt

SEQ ID NO: 1234 - DNA, 20 bp, Artificial Sequence
  Synthetic
tctgcttgatgatcatctcg

SEQ ID NO: 1235 - DNA, 30 bp, Artificial Sequence
  Synthetic
tctcataccttctgcttgatgatcatctcg

SEQ ID NO: 1236 - DNA, 20 bp, Artificial Sequence
  Synthetic
ttctgcttgatgatcatctc

SEQ ID NO: 1237 - DNA, 30 bp, Artificial Sequence
  Synthetic
ttctcataccttctgcttgatgatcatctc

SEQ ID NO: 1238 - DNA, 21 bp, Artificial Sequence
  Synthetic
cttctgcttgatgatcatctc

SEQ ID NO: 1239 - DNA, 18 bp, Artificial Sequence
  Synthetic
ctgcttgatgatcatctc

SEQ ID NO: 1240 - DNA, 19 bp, Artificial Sequence
  Synthetic
tctgcttgatgatcatctc

SEQ ID NO: 1241 - DNA, 29 bp, Artificial Sequence
  Synthetic
tctcataccttctgcttgatgatcatctc

SEQ ID NO: 1242 - DNA, 30 bp, Artificial Sequence
  Synthetic
aaaaacccaaaatattttagctcctactca

SEQ ID NO: 1243 - DNA, 40 bp, Artificial Sequence
  Synthetic
aaaaacccaaaatattttagctcctactcagactgttact

SEQ ID NO: 1244 - DNA, 30 bp, Artificial Sequence
  Synthetic
aaaacccaaaatattttagctcctactcag

SEQ ID NO: 1245 - DNA, 30 bp, Artificial Sequence
  Synthetic
aaacccaaaatattttagctcctactcaga

SEQ ID NO: 1246 - DNA, 30 bp, Artificial Sequence
  Synthetic
aacccaaaatattttagctcctactcagac

SEQ ID NO: 1247 - DNA, 30 bp, Artificial Sequence
  Synthetic
acccaaaatattttagctcctactcagact

SEQ ID NO: 1248 - DNA, 30 bp, Artificial Sequence
  Synthetic
cccaaaatattttagctcctactcagactg

SEQ ID NO: 1249 - DNA, 25 bp, Artificial Sequence
  Synthetic
cccaaaatattttagctcctactca

SEQ ID NO: 1250 - DNA, 28 bp, Artificial Sequence
  Synthetic
cccaaaatattttagctcctactcagac

SEQ ID NO: 1251 - DNA, 26 bp, Artificial Sequence
  Synthetic
cccaaaatattttagctcctactcag

SEQ ID NO: 1252 - DNA, 30 bp, Artificial Sequence
  Synthetic
ccaaaatattttagctcctactcagactgt

SEQ ID NO: 1253 - DNA, 24 bp, Artificial Sequence
  Synthetic
ccaaaatattttagctcctactca

SEQ ID NO: 1254 - DNA, 30 bp, Artificial Sequence
  Synthetic
caaaatattttagctcctactcagactgtt

SEQ ID NO: 1255 - DNA, 30 bp, Artificial Sequence
  Synthetic
aaaatattttagctcctactcagactgtta

SEQ ID NO: 1256 - DNA, 44 bp, Artificial Sequence
  Synthetic
aaaatattttagctcctactcagactgttactctggtgacacaa

SEQ ID NO: 1257 - DNA, 23 bp, Artificial Sequence
  Synthetic
aaaatattttagctcctactcag

SEQ ID NO: 1258 - DNA, 30 bp, Artificial Sequence
  Synthetic
aaatattttagctcctactcagactgttac

SEQ ID NO: 1259 - DNA, 40 bp, Artificial Sequence
  Synthetic
aaatattttagctcctactcagactgttactctggtgaca

SEQ ID NO: 1260 - DNA, 20 bp, Artificial Sequence
  Synthetic
aatattttagctcctactca

SEQ ID NO: 1261 - DNA, 30 bp, Artificial Sequence
  Synthetic
aatattttagctcctactcagactgttact

SEQ ID NO: 1262 - DNA, 26 bp, Artificial Sequence
  Synthetic
aatattttagctcctactcagactgt

SEQ ID NO: 1263 - DNA, 25 bp, Artificial Sequence
  Synthetic
aatattttagctcctactcagactg

SEQ ID NO: 1264 - DNA, 21 bp, Artificial Sequence
  Synthetic
aatattttagctcctactcag

SEQ ID NO: 1265 - DNA, 20 bp, Artificial Sequence
  Synthetic
atattttagctcctactcag

SEQ ID NO: 1266 - DNA, 30 bp, Artificial Sequence
  Synthetic
atattttagctcctactcagactgttactc

SEQ ID NO: 1267 - DNA, 21 bp, Artificial Sequence
  Synthetic
atattttagctcctactcaga

SEQ ID NO: 1268 - DNA, 20 bp, Artificial Sequence
  Synthetic
tattttagctcctactcaga

SEQ ID NO: 1269 - DNA, 30 bp, Artificial Sequence
  Synthetic
tattttagctcctactcagactgttactct

SEQ ID NO: 1270 - DNA, 35 bp, Artificial Sequence
  Synthetic
tattttagctcctactcagactgttactctggtga

SEQ ID NO: 1271 - DNA, 20 bp, Artificial Sequence
  Synthetic
attttagctcctactcagac

SEQ ID NO: 1272 - DNA, 30 bp, Artificial Sequence
  Synthetic
attttagctcctactcagactgttactctg

SEQ ID NO: 1273 - DNA, 20 bp, Artificial Sequence
  Synthetic
ttttagctcctactcagact

SEQ ID NO: 1274 - DNA, 30 bp, Artificial Sequence
  Synthetic
ttttagctcctactcagactgttactctgg

SEQ ID NO: 1275 - DNA, 23 bp, Artificial Sequence
  Synthetic
ttttagctcctactcagactgtt

SEQ ID NO: 1276 - DNA, 44 bp, Artificial Sequence
  Synthetic
ttttagctcctactcagactgttactctggtgacacaacctgtg

SEQ ID NO: 1277 - DNA, 20 bp, Artificial Sequence
  Synthetic
tttagctcctactcagactg

SEQ ID NO: 1278 - DNA, 30 bp, Artificial Sequence
  Synthetic
tttagctcctactcagactgttactctggt

SEQ ID NO: 1279 - DNA, 26 bp, Artificial Sequence
  Synthetic
tttagctcctactcagactgttactc

SEQ ID NO: 1280 - DNA, 25 bp, Artificial Sequence
  Synthetic
tttagctcctactcagactgttact

SEQ ID NO: 1281 - DNA, 20 bp, Artificial Sequence
  Synthetic
ttagctcctactcagactgt

SEQ ID NO: 1282 - DNA, 30 bp, Artificial Sequence
  Synthetic
ttagctcctactcagactgttactctggtg

SEQ ID NO: 1283 - DNA, 20 bp, Artificial Sequence
  Synthetic
tagctcctactcagactgtt

SEQ ID NO: 1284 - DNA, 30 bp, Artificial Sequence
  Synthetic
tagctcctactcagactgttactctggtga

SEQ ID NO: 1285 - DNA, 36 bp, Artificial Sequence
  Synthetic
tagctcctactcagactgttactctggtgacacaac

SEQ ID NO: 1286 - DNA, 20 bp, Artificial Sequence
  Synthetic
agctcctactcagactgtta

SEQ ID NO: 1287 - DNA, 30 bp, Artificial Sequence
  Synthetic
agctcctactcagactgttactctggtgac

SEQ ID NO: 1288 - DNA, 24 bp, Artificial Sequence
  Synthetic
agctcctactcagactgttactct

SEQ ID NO: 1289 - DNA, 25 bp, Artificial Sequence
  Synthetic
agctcctactcagactgttactctg

SEQ ID NO: 1290 - DNA, 20 bp, Artificial Sequence
  Synthetic
gctcctactcagactgttac

SEQ ID NO: 1291 - DNA, 30 bp, Artificial Sequence
  Synthetic
gctcctactcagactgttactctggtgaca

SEQ ID NO: 1292 - DNA, 24 bp, Artificial Sequence
  Synthetic
gctcctactcagactgttactctg

SEQ ID NO: 1293 - DNA, 26 bp, Artificial Sequence
  Synthetic
gctcctactcagactgttactctggt

SEQ ID NO: 1294 - DNA, 25 bp, Artificial Sequence
  Synthetic
gctcctactcagactgttactctgg

SEQ ID NO: 1295 - DNA, 20 bp, Artificial Sequence
  Synthetic
ctcctactcagactgttact

SEQ ID NO: 1296 - DNA, 30 bp, Artificial Sequence
  Synthetic
ctcctactcagactgttactctggtgacac

SEQ ID NO: 1297 - DNA, 25 bp, Artificial Sequence
  Synthetic
ctcctactcagactgttactctggt

SEQ ID NO: 1298 - DNA, 18 bp, Artificial Sequence
  Synthetic
ctcctactcagactgtta

SEQ ID NO: 1299 - DNA, 21 bp, Artificial Sequence
  Synthetic
ctcctactcagactgttactc

SEQ ID NO: 1300 - DNA, 31 bp, Artificial Sequence
  Synthetic
ctcctactcagactgttactctggtgacaca

SEQ ID NO: 1301 - DNA, 26 bp, Artificial Sequence
  Synthetic
ctcctactcagactgttactctggtg

SEQ ID NO: 1302 - DNA, 29 bp, Artificial Sequence
  Synthetic
ctcctactcagactgttactctggtgaca

SEQ ID NO: 1303 - DNA, 28 bp, Artificial Sequence
  Synthetic
ctcctactcagactgttactctggtgac

SEQ ID NO: 1304 - DNA, 27 bp, Artificial Sequence
  Synthetic
ctcctactcagactgttactctggtga

SEQ ID NO: 1305 - DNA, 23 bp, Artificial Sequence
  Synthetic
ctcctactcagactgttactctg

SEQ ID NO: 1306 - DNA, 20 bp, Artificial Sequence
  Synthetic
tcctactcagactgttactc

SEQ ID NO: 1307 - DNA, 30 bp, Artificial Sequence
  Synthetic
tcctactcagactgttactctggtgacaca

SEQ ID NO: 1308 - DNA, 25 bp, Artificial Sequence
  Synthetic
tcctactcagactgttactctggtg

SEQ ID NO: 1309 - DNA, 23 bp, Artificial Sequence
  Synthetic
tcctactcagactgttactctgg

SEQ ID NO: 1310 - DNA, 20 bp, Artificial Sequence
  Synthetic
cctactcagactgttactct

SEQ ID NO: 1311 - DNA, 30 bp, Artificial Sequence
  Synthetic
cctactcagactgttactctggtgacacaa

SEQ ID NO: 1312 - DNA, 25 bp, Artificial Sequence
  Synthetic
cctactcagactgttactctggtga

SEQ ID NO: 1313 - DNA, 19 bp, Artificial Sequence
  Synthetic
cctactcagactgttactc

SEQ ID NO: 1314 - DNA, 20 bp, Artificial Sequence
  Synthetic
ctactcagactgttactctg

SEQ ID NO: 1315 - DNA, 30 bp, Artificial Sequence
  Synthetic
ctactcagactgttactctggtgacacaac

SEQ ID NO: 1316 - DNA, 25 bp, Artificial Sequence
  Synthetic
ctactcagactgttactctggtgac

SEQ ID NO: 1317 - DNA, 26 bp, Artificial Sequence
  Synthetic
ctactcagactgttactctggtgaca

SEQ ID NO: 1318 - DNA, 19 bp, Artificial Sequence
  Synthetic
ctactcagactgttactct

SEQ ID NO: 1319 - DNA, 20 bp, Artificial Sequence
  Synthetic
tactcagactgttactctgg

SEQ ID NO: 1320 - DNA, 30 bp, Artificial Sequence
  Synthetic
tactcagactgttactctggtgacacaacc

SEQ ID NO: 1321 - DNA, 25 bp, Artificial Sequence
  Synthetic
tactcagactgttactctggtgaca

SEQ ID NO: 1322 - DNA, 20 bp, Artificial Sequence
  Synthetic
actcagactgttactctggt

SEQ ID NO: 1323 - DNA, 30 bp, Artificial Sequence
  Synthetic
actcagactgttactctggtgacacaacct

SEQ ID NO: 1324 - DNA, 25 bp, Artificial Sequence
  Synthetic
actcagactgttactctggtgacac

SEQ ID NO: 1325 - DNA, 20 bp, Artificial Sequence
  Synthetic
ctcagactgttactctggtg

SEQ ID NO: 1326 - DNA, 30 bp, Artificial Sequence
  Synthetic
ctcagactgttactctggtgacacaacctg

SEQ ID NO: 1327 - DNA, 25 bp, Artificial Sequence
  Synthetic
ctcagactgttactctggtgacaca

SEQ ID NO: 1328 - DNA, 32 bp, Artificial Sequence
  Synthetic
ctcagactgttactctggtgacacaacctgtg

SEQ ID NO: 1329 - DNA, 20 bp, Artificial Sequence
  Synthetic
tcagactgttactctggtga

SEQ ID NO: 1330 - DNA, 30 bp, Artificial Sequence
  Synthetic
tcagactgttactctggtgacacaacctgt

SEQ ID NO: 1331 - DNA, 25 bp, Artificial Sequence
  Synthetic
tcagactgttactctggtgacacaa

SEQ ID NO: 1332 - DNA, 20 bp, Artificial Sequence
  Synthetic
cagactgttactctggtgac

SEQ ID NO: 1333 - DNA, 30 bp, Artificial Sequence
  Synthetic
cagactgttactctggtgacacaacctgtg

SEQ ID NO: 1334 - DNA, 25 bp, Artificial Sequence
  Synthetic
cagactgttactctggtgacacaac

SEQ ID NO: 1335 - DNA, 20 bp, Artificial Sequence
  Synthetic
agactgttactctggtgaca

SEQ ID NO: 1336 - DNA, 30 bp, Artificial Sequence
  Synthetic
agactgttactctggtgacacaacctgtgg

SEQ ID NO: 1337 - DNA, 25 bp, Artificial Sequence
  Synthetic
agactgttactctggtgacacaacc

SEQ ID NO: 1338 - DNA, 19 bp, Artificial Sequence
  Synthetic
agactgttactctggtgac

SEQ ID NO: 1339 - DNA, 34 bp, Artificial Sequence
  Synthetic
agactgttactctggtgacacaacctgtggttac

SEQ ID NO: 1340 - DNA, 23 bp, Artificial Sequence
  Synthetic
agactgttactctggtgacacaa

SEQ ID NO: 1341 - DNA, 20 bp, Artificial Sequence
  Synthetic
gactgttactctggtgacac

SEQ ID NO: 1342 - DNA, 30 bp, Artificial Sequence
  Synthetic
gactgttactctggtgacacaacctgtggt

SEQ ID NO: 1343 - DNA, 25 bp, Artificial Sequence
  Synthetic
gactgttactctggtgacacaacct

SEQ ID NO: 1344 - DNA, 21 bp, Artificial Sequence
  Synthetic
gactgttactctggtgacaca

SEQ ID NO: 1345 - DNA, 20 bp, Artificial Sequence
  Synthetic
actgttactctggtgacaca

SEQ ID NO: 1346 - DNA, 30 bp, Artificial Sequence
  Synthetic
actgttactctggtgacacaacctgtggtt

SEQ ID NO: 1347 - DNA, 21 bp, Artificial Sequence
  Synthetic
actgttactctggtgacacaa

SEQ ID NO: 1348 - DNA, 25 bp, Artificial Sequence
  Synthetic
actgttactctggtgacacaacctg

SEQ ID NO: 1349 - DNA, 19 bp, Artificial Sequence
  Synthetic
actgttactctggtgacac

SEQ ID NO: 1350 - DNA, 20 bp, Artificial Sequence
  Synthetic
ctgttactctggtgacacaa

SEQ ID NO: 1351 - DNA, 30 bp, Artificial Sequence
  Synthetic
ctgttactctggtgacacaacctgtggtta

SEQ ID NO: 1352 - DNA, 23 bp, Artificial Sequence
  Synthetic
ctgttactctggtgacacaacct

SEQ ID NO: 1353 - DNA, 25 bp, Artificial Sequence
  Synthetic
ctgttactctggtgacacaacctgt

SEQ ID NO: 1354 - DNA, 20 bp, Artificial Sequence
  Synthetic
tgttactctggtgacacaac

SEQ ID NO: 1355 - DNA, 30 bp, Artificial Sequence
  Synthetic
tgttactctggtgacacaacctgtggttac

SEQ ID NO: 1356 - DNA, 25 bp, Artificial Sequence
  Synthetic
tgttactctggtgacacaacctgtg

SEQ ID NO: 1357 - DNA, 20 bp, Artificial Sequence
  Synthetic
gttactctggtgacacaacc

SEQ ID NO: 1358 - DNA, 30 bp, Artificial Sequence
  Synthetic
gttactctggtgacacaacctgtggttact

SEQ ID NO: 1359 - DNA, 25 bp, Artificial Sequence
  Synthetic
gttactctggtgacacaacctgtgg

SEQ ID NO: 1360 - DNA, 20 bp, Artificial Sequence
  Synthetic
ttactctggtgacacaacct

SEQ ID NO: 1361 - DNA, 30 bp, Artificial Sequence
  Synthetic
ttactctggtgacacaacctgtggttacta

SEQ ID NO: 1362 - DNA, 25 bp, Artificial Sequence
  Synthetic
ttactctggtgacacaacctgtggt

SEQ ID NO: 1363 - DNA, 26 bp, Artificial Sequence
  Synthetic
ttactctggtgacacaacctgtggtt

SEQ ID NO: 1364 - DNA, 20 bp, Artificial Sequence
  Synthetic
tactctggtgacacaacctg

SEQ ID NO: 1365 - DNA, 30 bp, Artificial Sequence
  Synthetic
tactctggtgacacaacctgtggttactaa

SEQ ID NO: 1366 - DNA, 25 bp, Artificial Sequence
  Synthetic
tactctggtgacacaacctgtggtt

SEQ ID NO: 1367 - DNA, 20 bp, Artificial Sequence
  Synthetic
actctggtgacacaacctgt

SEQ ID NO: 1368 - DNA, 30 bp, Artificial Sequence
  Synthetic
actctggtgacacaacctgtggttactaag

SEQ ID NO: 1369 - DNA, 25 bp, Artificial Sequence
  Synthetic
actctggtgacacaacctgtggtta

SEQ ID NO: 1370 - DNA, 20 bp, Artificial Sequence
  Synthetic
ctctggtgacacaacctgtg

SEQ ID NO: 1371 - DNA, 30 bp, Artificial Sequence
  Synthetic
ctctggtgacacaacctgtggttactaagg

SEQ ID NO: 1372 - DNA, 25 bp, Artificial Sequence
  Synthetic
ctctggtgacacaacctgtggttac

SEQ ID NO: 1373 - DNA, 20 bp, Artificial Sequence
  Synthetic
tctggtgacacaacctgtgg

SEQ ID NO: 1374 - DNA, 30 bp, Artificial Sequence
  Synthetic
tctggtgacacaacctgtggttactaagga

SEQ ID NO: 1375 - DNA, 25 bp, Artificial Sequence
  Synthetic
tctggtgacacaacctgtggttact

SEQ ID NO: 1376 - DNA, 20 bp, Artificial Sequence
  Synthetic
ctggtgacacaacctgtggt

SEQ ID NO: 1377 - DNA, 30 bp, Artificial Sequence
  Synthetic
ctggtgacacaacctgtggttactaaggaa

SEQ ID NO: 1378 - DNA, 19 bp, Artificial Sequence
  Synthetic
ctggtgacacaacctgtgg

SEQ ID NO: 1379 - DNA, 25 bp, Artificial Sequence
  Synthetic
ctggtgacacaacctgtggttacta

SEQ ID NO: 1380 - DNA, 21 bp, Artificial Sequence
  Synthetic
ctggtgacacaacctgtggtt

SEQ ID NO: 1381 - DNA, 20 bp, Artificial Sequence
  Synthetic
tggtgacacaacctgtggtt

SEQ ID NO: 1382 - DNA, 30 bp, Artificial Sequence
  Synthetic
tggtgacacaacctgtggttactaaggaaa

SEQ ID NO: 1383 - DNA, 25 bp, Artificial Sequence
  Synthetic
tggtgacacaacctgtggttactaa

SEQ ID NO: 1384 - DNA, 20 bp, Artificial Sequence
  Synthetic
ggtgacacaacctgtggtta

SEQ ID NO: 1385 - DNA, 30 bp, Artificial Sequence
  Synthetic
ggtgacacaacctgtggttactaaggaaac

SEQ ID NO: 1386 - DNA, 23 bp, Artificial Sequence
  Synthetic
ggtgacacaacctgtggttacta

SEQ ID NO: 1387 - DNA, 25 bp, Artificial Sequence
  Synthetic
ggtgacacaacctgtggttactaag

SEQ ID NO: 1388 - DNA, 20 bp, Artificial Sequence
  Synthetic
gtgacacaacctgtggttac

SEQ ID NO: 1389 - DNA, 30 bp, Artificial Sequence
  Synthetic
gtgacacaacctgtggttactaaggaaact

SEQ ID NO: 1390 - DNA, 25 bp, Artificial Sequence
  Synthetic
gtgacacaacctgtggttactaagg

SEQ ID NO: 1391 - DNA, 21 bp, Artificial Sequence
  Synthetic
gtgacacaacctgtggttact

SEQ ID NO: 1392 - DNA, 24 bp, Artificial Sequence
  Synthetic
gtgacacaacctgtggttactaag

SEQ ID NO: 1393 - DNA, 20 bp, Artificial Sequence
  Synthetic
tgacacaacctgtggttact

SEQ ID NO: 1394 - DNA, 30 bp, Artificial Sequence
  Synthetic
tgacacaacctgtggttactaaggaaactg

SEQ ID NO: 1395 - DNA, 25 bp, Artificial Sequence
  Synthetic
tgacacaacctgtggttactaagga

SEQ ID NO: 1396 - DNA, 20 bp, Artificial Sequence
  Synthetic
gacacaacctgtggttacta

SEQ ID NO: 1397 - DNA, 30 bp, Artificial Sequence
  Synthetic
gacacaacctgtggttactaaggaaactgc

SEQ ID NO: 1398 - DNA, 25 bp, Artificial Sequence
  Synthetic
gacacaacctgtggttactaaggaa

SEQ ID NO: 1399 - DNA, 27 bp, Artificial Sequence
  Synthetic
gacacaacctgtggttactaaggaaac

SEQ ID NO: 1400 - DNA, 20 bp, Artificial Sequence
  Synthetic
acacaacctgtggttactaa

SEQ ID NO: 1401 - DNA, 30 bp, Artificial Sequence
  Synthetic
acacaacctgtggttactaaggaaactgcc

SEQ ID NO: 1402 - DNA, 25 bp, Artificial Sequence
  Synthetic
acacaacctgtggttactaaggaaa

SEQ ID NO: 1403 - DNA, 20 bp, Artificial Sequence
  Synthetic
cacaacctgtggttactaag

SEQ ID NO: 1404 - DNA, 30 bp, Artificial Sequence
  Synthetic
cacaacctgtggttactaaggaaactgcca

SEQ ID NO: 1405 - DNA, 25 bp, Artificial Sequence
  Synthetic
cacaacctgtggttactaaggaaac

SEQ ID NO: 1406 - DNA, 20 bp, Artificial Sequence
  Synthetic
acaacctgtggttactaagg

SEQ ID NO: 1407 - DNA, 30 bp, Artificial Sequence
  Synthetic
acaacctgtggttactaaggaaactgccat

SEQ ID NO: 1408 - DNA, 25 bp, Artificial Sequence
  Synthetic
acaacctgtggttactaaggaaact

SEQ ID NO: 1409 - DNA, 20 bp, Artificial Sequence
  Synthetic
caacctgtggttactaagga

SEQ ID NO: 1410 - DNA, 30 bp, Artificial Sequence
  Synthetic
caacctgtggttactaaggaaactgccatc

SEQ ID NO: 1411 - DNA, 25 bp, Artificial Sequence
  Synthetic
caacctgtggttactaaggaaactg

SEQ ID NO: 1412 - DNA, 20 bp, Artificial Sequence
  Synthetic
aacctgtggttactaaggaa

SEQ ID NO: 1413 - DNA, 30 bp, Artificial Sequence
  Synthetic
aacctgtggttactaaggaaactgccatct

SEQ ID NO: 1414 - DNA, 25 bp, Artificial Sequence
  Synthetic
aacctgtggttactaaggaaactgc

SEQ ID NO: 1415 - DNA, 21 bp, Artificial Sequence
  Synthetic
aacctgtggttactaaggaaa

SEQ ID NO: 1416 - DNA, 20 bp, Artificial Sequence
  Synthetic
acctgtggttactaaggaaa

SEQ ID NO: 1417 - DNA, 30 bp, Artificial Sequence
  Synthetic
acctgtggttactaaggaaactgccatctc

SEQ ID NO: 1418 - DNA, 25 bp, Artificial Sequence
  Synthetic
acctgtggttactaaggaaactgcc

SEQ ID NO: 1419 - DNA, 19 bp, Artificial Sequence
  Synthetic
acctgtggttactaaggaa

SEQ ID NO: 1420 - DNA, 26 bp, Artificial Sequence
  Synthetic
acctgtggttactaaggaaactgcca

SEQ ID NO: 1421 - DNA, 20 bp, Artificial Sequence
  Synthetic
cctgtggttactaaggaaac

SEQ ID NO: 1422 - DNA, 30 bp, Artificial Sequence
  Synthetic
cctgtggttactaaggaaactgccatctcc

SEQ ID NO: 1423 - DNA, 25 bp, Artificial Sequence
  Synthetic
cctgtggttactaaggaaactgcca

SEQ ID NO: 1424 - DNA, 20 bp, Artificial Sequence
  Synthetic
ctgtggttactaaggaaact

SEQ ID NO: 1425 - DNA, 30 bp, Artificial Sequence
  Synthetic
ctgtggttactaaggaaactgccatctcca

SEQ ID NO: 1426 - DNA, 25 bp, Artificial Sequence
  Synthetic
ctgtggttactaaggaaactgccat

SEQ ID NO: 1427 - DNA, 19 bp, Artificial Sequence
  Synthetic
ctgtggttactaaggaaac

SEQ ID NO: 1428 - DNA, 20 bp, Artificial Sequence
  Synthetic
tgtggttactaaggaaactg

SEQ ID NO: 1429 - DNA, 30 bp, Artificial Sequence
  Synthetic
tgtggttactaaggaaactgccatctccaa

SEQ ID NO: 1430 - DNA, 25 bp, Artificial Sequence
  Synthetic
tgtggttactaaggaaactgccatc

SEQ ID NO: 1431 - DNA, 20 bp, Artificial Sequence
  Synthetic
gtggttactaaggaaactgc

SEQ ID NO: 1432 - DNA, 30 bp, Artificial Sequence
  Synthetic
gtggttactaaggaaactgccatctccaaa

SEQ ID NO: 1433 - DNA, 25 bp, Artificial Sequence
  Synthetic
gtggttactaaggaaactgccatct

SEQ ID NO: 1434 - DNA, 20 bp, Artificial Sequence
  Synthetic
tggttactaaggaaactgcc

SEQ ID NO: 1435 - DNA, 30 bp, Artificial Sequence
  Synthetic
tggttactaaggaaactgccatctccaaac

SEQ ID NO: 1436 - DNA, 25 bp, Artificial Sequence
  Synthetic
tggttactaaggaaactgccatctc

SEQ ID NO: 1437 - DNA, 20 bp, Artificial Sequence
  Synthetic
ggttactaaggaaactgcca

SEQ ID NO: 1438 - DNA, 30 bp, Artificial Sequence
  Synthetic
ggttactaaggaaactgccatctccaaact

SEQ ID NO: 1439 - DNA, 23 bp, Artificial Sequence
  Synthetic
ggttactaaggaaactgccatct

SEQ ID NO: 1440 - DNA, 25 bp, Artificial Sequence
  Synthetic
ggttactaaggaaactgccatctcc

SEQ ID NO: 1441 - DNA, 24 bp, Artificial Sequence
  Synthetic
ggttactaaggaaactgccatctc

SEQ ID NO: 1442 - DNA, 20 bp, Artificial Sequence
  Synthetic
gttactaaggaaactgccat

SEQ ID NO: 1443 - DNA, 30 bp, Artificial Sequence
  Synthetic
gttactaaggaaactgccatctccaaacta

SEQ ID NO: 1444 - DNA, 25 bp, Artificial Sequence
  Synthetic
gttactaaggaaactgccatctcca

SEQ ID NO: 1445 - DNA, 19 bp, Artificial Sequence
  Synthetic
gttactaaggaaactgcca

SEQ ID NO: 1446 - DNA, 20 bp, Artificial Sequence
  Synthetic
ttactaaggaaactgccatc

SEQ ID NO: 1447 - DNA, 30 bp, Artificial Sequence
  Synthetic
ttactaaggaaactgccatctccaaactag

SEQ ID NO: 1448 - DNA, 25 bp, Artificial Sequence
  Synthetic
ttactaaggaaactgccatctccaa

SEQ ID NO: 1449 - DNA, 28 bp, Artificial Sequence
  Synthetic
ttactaaggaaactgccatctccaaact

SEQ ID NO: 1450 - DNA, 38 bp, Artificial Sequence
  Synthetic
ttactaaggaaactgccatctccaaactagaaatgcca

SEQ ID NO: 1451 - DNA, 20 bp, Artificial Sequence
  Synthetic
tactaaggaaactgccatct

SEQ ID NO: 1452 - DNA, 30 bp, Artificial Sequence
  Synthetic
tactaaggaaactgccatctccaaactaga

SEQ ID NO: 1453 - DNA, 25 bp, Artificial Sequence
  Synthetic
tactaaggaaactgccatctccaaa

SEQ ID NO: 1454 - DNA, 21 bp, Artificial Sequence
  Synthetic
tactaaggaaactgccatctc

SEQ ID NO: 1455 - DNA, 20 bp, Artificial Sequence
  Synthetic
actaaggaaactgccatctc

SEQ ID NO: 1456 - DNA, 30 bp, Artificial Sequence
  Synthetic
actaaggaaactgccatctccaaactagaa

SEQ ID NO: 1457 - DNA, 25 bp, Artificial Sequence
  Synthetic
actaaggaaactgccatctccaaac

SEQ ID NO: 1458 - DNA, 18 bp, Artificial Sequence
  Synthetic
actaaggaaactgccatc

SEQ ID NO: 1459 - DNA, 31 bp, Artificial Sequence
  Synthetic
actaaggaaactgccatctccaaactagaaa

SEQ ID NO: 1460 - DNA, 20 bp, Artificial Sequence
  Synthetic
ctaaggaaactgccatctcc

SEQ ID NO: 1461 - DNA, 30 bp, Artificial Sequence
  Synthetic
ctaaggaaactgccatctccaaactagaaa

SEQ ID NO: 1462 - DNA, 25 bp, Artificial Sequence
  Synthetic
ctaaggaaactgccatctccaaact

SEQ ID NO: 1463 - DNA, 20 bp, Artificial Sequence
  Synthetic
taaggaaactgccatctcca

SEQ ID NO: 1464 - DNA, 30 bp, Artificial Sequence
  Synthetic
taaggaaactgccatctccaaactagaaat

SEQ ID NO: 1465 - DNA, 25 bp, Artificial Sequence
  Synthetic
taaggaaactgccatctccaaacta

SEQ ID NO: 1466 - DNA, 20 bp, Artificial Sequence
  Synthetic
aaggaaactgccatctccaa

SEQ ID NO: 1467 - DNA, 30 bp, Artificial Sequence
  Synthetic
aaggaaactgccatctccaaactagaaatg

SEQ ID NO: 1468 - DNA, 25 bp, Artificial Sequence
  Synthetic
aaggaaactgccatctccaaactag

SEQ ID NO: 1469 - DNA, 24 bp, Artificial Sequence
  Synthetic
aaggaaactgccatctccaaacta

SEQ ID NO: 1470 - DNA, 20 bp, Artificial Sequence
  Synthetic
aggaaactgccatctccaaa

SEQ ID NO: 1471 - DNA, 30 bp, Artificial Sequence
  Synthetic
aggaaactgccatctccaaactagaaatgc

SEQ ID NO: 1472 - DNA, 25 bp, Artificial Sequence
  Synthetic
aggaaactgccatctccaaactaga

SEQ ID NO: 1473 - DNA, 31 bp, Artificial Sequence
  Synthetic
aggaaactgccatctccaaactagaaatgcc

SEQ ID NO: 1474 - DNA, 20 bp, Artificial Sequence
  Synthetic
ggaaactgccatctccaaac

SEQ ID NO: 1475 - DNA, 30 bp, Artificial Sequence
  Synthetic
ggaaactgccatctccaaactagaaatgcc

SEQ ID NO: 1476 - DNA, 25 bp, Artificial Sequence
  Synthetic
ggaaactgccatctccaaactagaa

SEQ ID NO: 1477 - DNA, 43 bp, Artificial Sequence
  Synthetic
ggaaactgccatctccaaactagaaatgccatcttccttgatg

SEQ ID NO: 1478 - DNA, 20 bp, Artificial Sequence
  Synthetic
gaaactgccatctccaaact

SEQ ID NO: 1479 - DNA, 30 bp, Artificial Sequence
  Synthetic
gaaactgccatctccaaactagaaatgcca

SEQ ID NO: 1480 - DNA, 25 bp, Artificial Sequence
  Synthetic
gaaactgccatctccaaactagaaa

SEQ ID NO: 1481 - DNA, 26 bp, Artificial Sequence
  Synthetic
gaaactgccatctccaaactagaaat

SEQ ID NO: 1482 - DNA, 20 bp, Artificial Sequence
  Synthetic
aaactgccatctccaaacta

SEQ ID NO: 1483 - DNA, 30 bp, Artificial Sequence
  Synthetic
aaactgccatctccaaactagaaatgccat

SEQ ID NO: 1484 - DNA, 25 bp, Artificial Sequence
  Synthetic
aaactgccatctccaaactagaaat

SEQ ID NO: 1485 - DNA, 20 bp, Artificial Sequence
  Synthetic
aactgccatctccaaactag

SEQ ID NO: 1486 - DNA, 30 bp, Artificial Sequence
  Synthetic
aactgccatctccaaactagaaatgccatc

SEQ ID NO: 1487 - DNA, 25 bp, Artificial Sequence
  Synthetic
aactgccatctccaaactagaaatg

SEQ ID NO: 1488 - DNA, 18 bp, Artificial Sequence
  Synthetic
aactgccatctccaaact

SEQ ID NO: 1489 - DNA, 20 bp, Artificial Sequence
  Synthetic
actgccatctccaaactaga

SEQ ID NO: 1490 - DNA, 30 bp, Artificial Sequence
  Synthetic
actgccatctccaaactagaaatgccatct

SEQ ID NO: 1491 - DNA, 25 bp, Artificial Sequence
  Synthetic
actgccatctccaaactagaaatgc

SEQ ID NO: 1492 - DNA, 21 bp, Artificial Sequence
  Synthetic
actgccatctccaaactagaa

SEQ ID NO: 1493 - DNA, 20 bp, Artificial Sequence
  Synthetic
ctgccatctccaaactagaa

SEQ ID NO: 1494 - DNA, 30 bp, Artificial Sequence
  Synthetic
ctgccatctccaaactagaaatgccatctt

SEQ ID NO: 1495 - DNA, 25 bp, Artificial Sequence
  Synthetic
ctgccatctccaaactagaaatgcc

SEQ ID NO: 1496 - DNA, 26 bp, Artificial Sequence
  Synthetic
ctgccatctccaaactagaaatgcca

SEQ ID NO: 1497 - DNA, 20 bp, Artificial Sequence
  Synthetic
tgccatctccaaactagaaa

SEQ ID NO: 1498 - DNA, 30 bp, Artificial Sequence
  Synthetic
tgccatctccaaactagaaatgccatcttc

SEQ ID NO: 1499 - DNA, 25 bp, Artificial Sequence
  Synthetic
tgccatctccaaactagaaatgcca

SEQ ID NO: 1500 - DNA, 27 bp, Artificial Sequence
  Synthetic
tgccatctccaaactagaaatgccatc

SEQ ID NO: 1501 - DNA, 20 bp, Artificial Sequence
  Synthetic
gccatctccaaactagaaat

SEQ ID NO: 1502 - DNA, 30 bp, Artificial Sequence
  Synthetic
gccatctccaaactagaaatgccatcttcc

SEQ ID NO: 1503 - DNA, 25 bp, Artificial Sequence
  Synthetic
gccatctccaaactagaaatgccat

SEQ ID NO: 1504 - DNA, 20 bp, Artificial Sequence
  Synthetic
ccatctccaaactagaaatg

SEQ ID NO: 1505 - DNA, 30 bp, Artificial Sequence
  Synthetic
ccatctccaaactagaaatgccatcttcct

SEQ ID NO: 1506 - DNA, 25 bp, Artificial Sequence
  Synthetic
ccatctccaaactagaaatgccatc

SEQ ID NO: 1507 - DNA, 20 bp, Artificial Sequence
  Synthetic
catctccaaactagaaatgc

SEQ ID NO: 1508 - DNA, 30 bp, Artificial Sequence
  Synthetic
catctccaaactagaaatgccatcttcctt

SEQ ID NO: 1509 - DNA, 19 bp, Artificial Sequence
  Synthetic
catctccaaactagaaatg

SEQ ID NO: 1510 - DNA, 25 bp, Artificial Sequence
  Synthetic
catctccaaactagaaatgccatct

SEQ ID NO: 1511 - DNA, 21 bp, Artificial Sequence
  Synthetic
catctccaaactagaaatgcc

SEQ ID NO: 1512 - DNA, 20 bp, Artificial Sequence
  Synthetic
atctccaaactagaaatgcc

SEQ ID NO: 1513 - DNA, 30 bp, Artificial Sequence
  Synthetic
atctccaaactagaaatgccatcttccttg

SEQ ID NO: 1514 - DNA, 25 bp, Artificial Sequence
  Synthetic
atctccaaactagaaatgccatctt

SEQ ID NO: 1515 - DNA, 29 bp, Artificial Sequence
  Synthetic
atctccaaactagaaatgccatcttcctt

SEQ ID NO: 1516 - DNA, 20 bp, Artificial Sequence
  Synthetic
tctccaaactagaaatgcca

SEQ ID NO: 1517 - DNA, 30 bp, Artificial Sequence
  Synthetic
tctccaaactagaaatgccatcttccttga

SEQ ID NO: 1518 - DNA, 25 bp, Artificial Sequence
  Synthetic
tctccaaactagaaatgccatcttc

SEQ ID NO: 1519 - DNA, 20 bp, Artificial Sequence
  Synthetic
ctccaaactagaaatgccat

SEQ ID NO: 1520 - DNA, 30 bp, Artificial Sequence
  Synthetic
ctccaaactagaaatgccatcttccttgat

SEQ ID NO: 1521 - DNA, 18 bp, Artificial Sequence
  Synthetic
ctccaaactagaaatgcc

SEQ ID NO: 1522 - DNA, 25 bp, Artificial Sequence
  Synthetic
ctccaaactagaaatgccatcttcc

SEQ ID NO: 1523 - DNA, 45 bp, Artificial Sequence
  Synthetic
ctccaaactagaaatgccatcttccttgatgttggaggtacctgc

SEQ ID NO: 1524 - DNA, 20 bp, Artificial Sequence
  Synthetic
tccaaactagaaatgccatc

SEQ ID NO: 1525 - DNA, 30 bp, Artificial Sequence
  Synthetic
tccaaactagaaatgccatcttccttgatg

SEQ ID NO: 1526 - DNA, 25 bp, Artificial Sequence
  Synthetic
tccaaactagaaatgccatcttcct

SEQ ID NO: 1527 - DNA, 20 bp, Artificial Sequence
  Synthetic
ccaaactagaaatgccatct

SEQ ID NO: 1528 - DNA, 30 bp, Artificial Sequence
  Synthetic
ccaaactagaaatgccatcttccttgatgt

SEQ ID NO: 1529 - DNA, 25 bp, Artificial Sequence
  Synthetic
ccaaactagaaatgccatcttcctt

SEQ ID NO: 1530 - DNA, 18 bp, Artificial Sequence
  Synthetic
ccaaactagaaatgccat

SEQ ID NO: 1531 - DNA, 21 bp, Artificial Sequence
  Synthetic
ccaaactagaaatgccatctt

SEQ ID NO: 1532 - DNA, 22 bp, Artificial Sequence
  Synthetic
ccaaactagaaatgccatcttc

SEQ ID NO: 1533 - DNA, 23 bp, Artificial Sequence
  Synthetic
ccaaactagaaatgccatcttcc

SEQ ID NO: 1534 - DNA, 29 bp, Artificial Sequence
  Synthetic
ccaaactagaaatgccatcttccttgatg

SEQ ID NO: 1535 - DNA, 20 bp, Artificial Sequence
  Synthetic
caaactagaaatgccatctt

SEQ ID NO: 1536 - DNA, 30 bp, Artificial Sequence
  Synthetic
caaactagaaatgccatcttccttgatgtt

SEQ ID NO: 1537 - DNA, 25 bp, Artificial Sequence
  Synthetic
caaactagaaatgccatcttccttg

SEQ ID NO: 1538 - DNA, 42 bp, Artificial Sequence
  Synthetic
caaactagaaatgccatcttccttgatgttggaggtacctgc

SEQ ID NO: 1539 - DNA, 25 bp, Artificial Sequence
  Synthetic
aaactagaaatgccatcttccttga

SEQ ID NO: 1540 - DNA, 30 bp, Artificial Sequence
  Synthetic
aaactagaaatgccatcttccttgatgttg

SEQ ID NO: 1541 - DNA, 20 bp, Artificial Sequence
  Synthetic
aaactagaaatgccatcttc

SEQ ID NO: 1542 - DNA, 40 bp, Artificial Sequence
  Synthetic
aactagaaatgccatcttccttgatgttggaggtacctgc

SEQ ID NO: 1543 - DNA, 18 bp, Artificial Sequence
  Synthetic
aactagaaatgccatctt

SEQ ID NO: 1544 - DNA, 25 bp, Artificial Sequence
  Synthetic
aactagaaatgccatcttccttgat

SEQ ID NO: 1545 - DNA, 20 bp, Artificial Sequence
  Synthetic
aactagaaatgccatcttcc

SEQ ID NO: 1546 - DNA, 26 bp, Artificial Sequence
  Synthetic
aactagaaatgccatcttccttgatg

SEQ ID NO: 1547 - DNA, 30 bp, Artificial Sequence
  Synthetic
aactagaaatgccatcttccttgatgttgg

SEQ ID NO: 1548 - DNA, 30 bp, Artificial Sequence
  Synthetic
actagaaatgccatcttccttgatgttgga

SEQ ID NO: 1549 - DNA, 42 bp, Artificial Sequence
  Synthetic
actagaaatgccatcttccttgatgttggaggtacctgctct

SEQ ID NO: 1550 - DNA, 30 bp, Artificial Sequence
  Synthetic
ctagaaatgccatcttccttgatgttggag

SEQ ID NO: 1551 - DNA, 30 bp, Artificial Sequence
  Synthetic
tagaaatgccatcttccttgatgttggagg

SEQ ID NO: 1552 - DNA, 30 bp, Artificial Sequence
  Synthetic
agaaatgccatcttccttgatgttggaggt

SEQ ID NO: 1553 - DNA, 35 bp, Artificial Sequence
  Synthetic
agaaatgccatcttccttgatgttggaggtacctg

SEQ ID NO: 1554 - DNA, 28 bp, Artificial Sequence
  Synthetic
agaaatgccatcttccttgatgttggag

SEQ ID NO: 1555 - DNA, 30 bp, Artificial Sequence
  Synthetic
gaaatgccatcttccttgatgttggaggta

SEQ ID NO: 1556 - DNA, 31 bp, Artificial Sequence
  Synthetic
gaaatgccatcttccttgatgttggaggtac

SEQ ID NO: 1557 - DNA, 28 bp, Artificial Sequence
  Synthetic
gaaatgccatcttccttgatgttggagg

SEQ ID NO: 1558 - DNA, 30 bp, Artificial Sequence
  Synthetic
aaatgccatcttccttgatgttggaggtac

SEQ ID NO: 1559 - DNA, 30 bp, Artificial Sequence
  Synthetic
aatgccatcttccttgatgttggaggtacc

SEQ ID NO: 1560 - DNA, 29 bp, Artificial Sequence
  Synthetic
aatgccatcttccttgatgttggaggtac

SEQ ID NO: 1561 - DNA, 25 bp, Artificial Sequence
  Synthetic
aatgccatcttccttgatgttggag

SEQ ID NO: 1562 - DNA, 30 bp, Artificial Sequence
  Synthetic
atgccatcttccttgatgttggaggtacct

SEQ ID NO: 1563 - DNA, 28 bp, Artificial Sequence
  Synthetic
atgccatcttccttgatgttggaggtac

SEQ ID NO: 1564 - DNA, 25 bp, Artificial Sequence
  Synthetic
atgccatcttccttgatgttggagg

SEQ ID NO: 1565 - DNA, 30 bp, Artificial Sequence
  Synthetic
tgccatcttccttgatgttggaggtacctg

SEQ ID NO: 1566 - DNA, 25 bp, Artificial Sequence
  Synthetic
tgccatcttccttgatgttggaggt

SEQ ID NO: 1567 - DNA, 26 bp, Artificial Sequence
  Synthetic
tgccatcttccttgatgttggaggta

SEQ ID NO: 1568 - DNA, 27 bp, Artificial Sequence
  Synthetic
tgccatcttccttgatgttggaggtac

SEQ ID NO: 1569 - DNA, 30 bp, Artificial Sequence
  Synthetic
gccatcttccttgatgttggaggtacctgc

SEQ ID NO: 1570 - DNA, 25 bp, Artificial Sequence
  Synthetic
gccatcttccttgatgttggaggta

SEQ ID NO: 1571 - DNA, 26 bp, Artificial Sequence
  Synthetic
gccatcttccttgatgttggaggtac

SEQ ID NO: 1572 - DNA, 27 bp, Artificial Sequence
  Synthetic
gccatcttccttgatgttggaggtacc

SEQ ID NO: 1573 - DNA, 29 bp, Artificial Sequence
  Synthetic
gccatcttccttgatgttggaggtacctg

SEQ ID NO: 1574 - DNA, 28 bp, Artificial Sequence
  Synthetic
gccatcttccttgatgttggaggtacct

SEQ ID NO: 1575 - DNA, 24 bp, Artificial Sequence
  Synthetic
gccatcttccttgatgttggaggt

SEQ ID NO: 1576 - DNA, 23 bp, Artificial Sequence
  Synthetic
gccatcttccttgatgttggagg

SEQ ID NO: 1577 - DNA, 30 bp, Artificial Sequence
  Synthetic
ccatcttccttgatgttggaggtacctgct

SEQ ID NO: 1578 - DNA, 27 bp, Artificial Sequence
  Synthetic
ccatcttccttgatgttggaggtacct

SEQ ID NO: 1579 - DNA, 25 bp, Artificial Sequence
  Synthetic
ccatcttccttgatgttggaggtac

SEQ ID NO: 1580 - DNA, 26 bp, Artificial Sequence
  Synthetic
ccatcttccttgatgttggaggtacc

SEQ ID NO: 1581 - DNA, 21 bp, Artificial Sequence
  Synthetic
ccatcttccttgatgttggag

SEQ ID NO: 1582 - DNA, 22 bp, Artificial Sequence
  Synthetic
ccatcttccttgatgttggagg

SEQ ID NO: 1583 - DNA, 30 bp, Artificial Sequence
  Synthetic
catcttccttgatgttggaggtacctgctc

SEQ ID NO: 1584 - DNA, 25 bp, Artificial Sequence
  Synthetic
catcttccttgatgttggaggtacc

SEQ ID NO: 1585 - DNA, 29 bp, Artificial Sequence
  Synthetic
catcttccttgatgttggaggtacctgct

SEQ ID NO: 1586 - DNA, 24 bp, Artificial Sequence
  Synthetic
catcttccttgatgttggaggtac

SEQ ID NO: 1587 - DNA, 21 bp, Artificial Sequence
  Synthetic
catcttccttgatgttggagg

SEQ ID NO: 1588 - DNA, 20 bp, Artificial Sequence
  Synthetic
catcttccttgatgttggag

SEQ ID NO: 1589 - DNA, 30 bp, Artificial Sequence
  Synthetic
atcttccttgatgttggaggtacctgctct

SEQ ID NO: 1590 - DNA, 25 bp, Artificial Sequence
  Synthetic
atcttccttgatgttggaggtacct

SEQ ID NO: 1591 - DNA, 21 bp, Artificial Sequence
  Synthetic
atcttccttgatgttggaggt

SEQ ID NO: 1592 - DNA, 23 bp, Artificial Sequence
  Synthetic
atcttccttgatgttggaggtac

SEQ ID NO: 1593 - DNA, 20 bp, Artificial Sequence
  Synthetic
atcttccttgatgttggagg

SEQ ID NO: 1594 - DNA, 20 bp, Artificial Sequence
  Synthetic
tcttccttgatgttggaggt

SEQ ID NO: 1595 - DNA, 30 bp, Artificial Sequence
  Synthetic
tcttccttgatgttggaggtacctgctctg

SEQ ID NO: 1596 - DNA, 25 bp, Artificial Sequence
  Synthetic
tcttccttgatgttggaggtacctg

SEQ ID NO: 1597 - DNA, 22 bp, Artificial Sequence
  Synthetic
tcttccttgatgttggaggtac

SEQ ID NO: 1598 - DNA, 18 bp, Artificial Sequence
  Synthetic
tcttccttgatgttggag

SEQ ID NO: 1599 - DNA, 20 bp, Artificial Sequence
  Synthetic
cttccttgatgttggaggta

SEQ ID NO: 1600 - DNA, 30 bp, Artificial Sequence
  Synthetic
cttccttgatgttggaggtacctgctctgg

SEQ ID NO: 1601 - DNA, 25 bp, Artificial Sequence
  Synthetic
cttccttgatgttggaggtacctgc

SEQ ID NO: 1602 - DNA, 27 bp, Artificial Sequence
  Synthetic
cttccttgatgttggaggtacctgctc

SEQ ID NO: 1603 - DNA, 29 bp, Artificial Sequence
  Synthetic
cttccttgatgttggaggtacctgctctg

SEQ ID NO: 1604 - DNA, 21 bp, Artificial Sequence
  Synthetic
cttccttgatgttggaggtac

SEQ ID NO: 1605 - DNA, 20 bp, Artificial Sequence
  Synthetic
ttccttgatgttggaggtac

SEQ ID NO: 1606 - DNA, 30 bp, Artificial Sequence
  Synthetic
ttccttgatgttggaggtacctgctctggc

SEQ ID NO: 1607 - DNA, 25 bp, Artificial Sequence
  Synthetic
ttccttgatgttggaggtacctgct

SEQ ID NO: 1608 - DNA, 26 bp, Artificial Sequence
  Synthetic
ttccttgatgttggaggtacctgctc

SEQ ID NO: 1609 - DNA, 20 bp, Artificial Sequence
  Synthetic
tccttgatgttggaggtacc

SEQ ID NO: 1610 - DNA, 30 bp, Artificial Sequence
  Synthetic
tccttgatgttggaggtacctgctctggca

SEQ ID NO: 1611 - DNA, 25 bp, Artificial Sequence
  Synthetic
tccttgatgttggaggtacctgctc

SEQ ID NO: 1612 - DNA, 21 bp, Artificial Sequence
  Synthetic
tccttgatgttggaggtacct

SEQ ID NO: 1613 - DNA, 20 bp, Artificial Sequence
  Synthetic
ccttgatgttggaggtacct

SEQ ID NO: 1614 - DNA, 30 bp, Artificial Sequence
  Synthetic
ccttgatgttggaggtacctgctctggcag

SEQ ID NO: 1615 - DNA, 25 bp, Artificial Sequence
  Synthetic
ccttgatgttggaggtacctgctct

SEQ ID NO: 1616 - DNA, 22 bp, Artificial Sequence
  Synthetic
ccttgatgttggaggtacctgc

SEQ ID NO: 1617 - DNA, 24 bp, Artificial Sequence
  Synthetic
ccttgatgttggaggtacctgctc

SEQ ID NO: 1618 - DNA, 26 bp, Artificial Sequence
  Synthetic
ccttgatgttggaggtacctgctctg

SEQ ID NO: 1619 - DNA, 28 bp, Artificial Sequence
  Synthetic
ccttgatgttggaggtacctgctctggc

SEQ ID NO: 1620 - DNA, 20 bp, Artificial Sequence
  Synthetic
cttgatgttggaggtacctg

SEQ ID NO: 1621 - DNA, 30 bp, Artificial Sequence
  Synthetic
cttgatgttggaggtacctgctctggcaga

SEQ ID NO: 1622 - DNA, 25 bp, Artificial Sequence
  Synthetic
cttgatgttggaggtacctgctctg

SEQ ID NO: 1623 - DNA, 29 bp, Artificial Sequence
  Synthetic
cttgatgttggaggtacctgctctggcag

SEQ ID NO: 1624 - DNA, 23 bp, Artificial Sequence
  Synthetic
cttgatgttggaggtacctgctc

SEQ ID NO: 1625 - DNA, 20 bp, Artificial Sequence
  Synthetic
ttgatgttggaggtacctgc

SEQ ID NO: 1626 - DNA, 30 bp, Artificial Sequence
  Synthetic
ttgatgttggaggtacctgctctggcagat

SEQ ID NO: 1627 - DNA, 25 bp, Artificial Sequence
  Synthetic
ttgatgttggaggtacctgctctgg

SEQ ID NO: 1628 - DNA, 20 bp, Artificial Sequence
  Synthetic
tgatgttggaggtacctgct

SEQ ID NO: 1629 - DNA, 30 bp, Artificial Sequence
  Synthetic
tgatgttggaggtacctgctctggcagatt

SEQ ID NO: 1630 - DNA, 25 bp, Artificial Sequence
  Synthetic
tgatgttggaggtacctgctctggc

SEQ ID NO: 1631 - DNA, 20 bp, Artificial Sequence
  Synthetic
gatgttggaggtacctgctc

SEQ ID NO: 1632 - DNA, 30 bp, Artificial Sequence
  Synthetic
gatgttggaggtacctgctctggcagattt

SEQ ID NO: 1633 - DNA, 23 bp, Artificial Sequence
  Synthetic
gatgttggaggtacctgctctgg

SEQ ID NO: 1634 - DNA, 24 bp, Artificial Sequence
  Synthetic
gatgttggaggtacctgctctggc

SEQ ID NO: 1635 - DNA, 25 bp, Artificial Sequence
  Synthetic
gatgttggaggtacctgctctggca

SEQ ID NO: 1636 - DNA, 20 bp, Artificial Sequence
  Synthetic
atgttggaggtacctgctct

SEQ ID NO: 1637 - DNA, 30 bp, Artificial Sequence
  Synthetic
atgttggaggtacctgctctggcagatttc

SEQ ID NO: 1638 - DNA, 25 bp, Artificial Sequence
  Synthetic
atgttggaggtacctgctctggcag

SEQ ID NO: 1639 - DNA, 20 bp, Artificial Sequence
  Synthetic
tgttggaggtacctgctctg

SEQ ID NO: 1640 - DNA, 30 bp, Artificial Sequence
  Synthetic
tgttggaggtacctgctctggcagatttca

SEQ ID NO: 1641 - DNA, 25 bp, Artificial Sequence
  Synthetic
tgttggaggtacctgctctggcaga

SEQ ID NO: 1642 - DNA, 20 bp, Artificial Sequence
  Synthetic
gttggaggtacctgctctgg

SEQ ID NO: 1643 - DNA, 30 bp, Artificial Sequence
  Synthetic
gttggaggtacctgctctggcagatttcaa

SEQ ID NO: 1644 - DNA, 25 bp, Artificial Sequence
  Synthetic
gttggaggtacctgctctggcagat

SEQ ID NO: 1645 - DNA, 20 bp, Artificial Sequence
  Synthetic
ttggaggtacctgctctggc

SEQ ID NO: 1646 - DNA, 30 bp, Artificial Sequence
  Synthetic
ttggaggtacctgctctggcagatttcaac

SEQ ID NO: 1647 - DNA, 27 bp, Artificial Sequence
  Synthetic
ttggaggtacctgctctggcagatttc

SEQ ID NO: 1648 - DNA, 25 bp, Artificial Sequence
  Synthetic
ttggaggtacctgctctggcagatt

SEQ ID NO: 1649 - DNA, 20 bp, Artificial Sequence
  Synthetic
tggaggtacctgctctggca

SEQ ID NO: 1650 - DNA, 30 bp, Artificial Sequence
  Synthetic
tggaggtacctgctctggcagatttcaacc

SEQ ID NO: 1651 - DNA, 21 bp, Artificial Sequence
  Synthetic
tggaggtacctgctctggcag

SEQ ID NO: 1652 - DNA, 25 bp, Artificial Sequence
  Synthetic
tggaggtacctgctctggcagattt

SEQ ID NO: 1653 - DNA, 18 bp, Artificial Sequence
  Synthetic
tggaggtacctgctctgg

SEQ ID NO: 1654 - DNA, 20 bp, Artificial Sequence
  Synthetic
ggaggtacctgctctggcag

SEQ ID NO: 1655 - DNA, 30 bp, Artificial Sequence
  Synthetic
ggaggtacctgctctggcagatttcaaccg

SEQ ID NO: 1656 - DNA, 25 bp, Artificial Sequence
  Synthetic
ggaggtacctgctctggcagatttc

SEQ ID NO: 1657 - DNA, 20 bp, Artificial Sequence
  Synthetic
gaggtacctgctctggcaga

SEQ ID NO: 1658 - DNA, 30 bp, Artificial Sequence
  Synthetic
gaggtacctgctctggcagatttcaaccgg

SEQ ID NO: 1659 - DNA, 25 bp, Artificial Sequence
  Synthetic
gaggtacctgctctggcagatttca

SEQ ID NO: 1660 - DNA, 24 bp, Artificial Sequence
  Synthetic
gaggtacctgctctggcagatttc

SEQ ID NO: 1661 - DNA, 20 bp, Artificial Sequence
  Synthetic
aggtacctgctctggcagat

SEQ ID NO: 1662 - DNA, 30 bp, Artificial Sequence
  Synthetic
aggtacctgctctggcagatttcaaccggg

SEQ ID NO: 1663 - DNA, 25 bp, Artificial Sequence
  Synthetic
aggtacctgctctggcagatttcaa

SEQ ID NO: 1664 - DNA, 20 bp, Artificial Sequence
  Synthetic
ggtacctgctctggcagatt

SEQ ID NO: 1665 - DNA, 30 bp, Artificial Sequence
  Synthetic
ggtacctgctctggcagatttcaaccgggc

SEQ ID NO: 1666 - DNA, 25 bp, Artificial Sequence
  Synthetic
ggtacctgctctggcagatttcaac

SEQ ID NO: 1667 - DNA, 30 bp, Artificial Sequence
  Synthetic
gtacctgctctggcagatttcaaccgggct

SEQ ID NO: 1668 - DNA, 26 bp, Artificial Sequence
  Synthetic
gtacctgctctggcagatttcaaccg

SEQ ID NO: 1669 - DNA, 25 bp, Artificial Sequence
  Synthetic
gtacctgctctggcagatttcaacc

SEQ ID NO: 1670 - DNA, 30 bp, Artificial Sequence
  Synthetic
tacctgctctggcagatttcaaccgggctt

SEQ ID NO: 1671 - DNA, 25 bp, Artificial Sequence
  Synthetic
tacctgctctggcagatttcaaccg

SEQ ID NO: 1672 - DNA, 30 bp, Artificial Sequence
  Synthetic
acctgctctggcagatttcaaccgggcttg

SEQ ID NO: 1673 - DNA, 25 bp, Artificial Sequence
  Synthetic
acctgctctggcagatttcaaccgg

SEQ ID NO: 1674 - DNA, 20 bp, Artificial Sequence
  Synthetic
cctgctctggcagatttcaa

SEQ ID NO: 1675 - DNA, 30 bp, Artificial Sequence
  Synthetic
cctgctctggcagatttcaaccgggcttgg

SEQ ID NO: 1676 - DNA, 25 bp, Artificial Sequence
  Synthetic
cctgctctggcagatttcaaccggg

SEQ ID NO: 1677 - DNA, 20 bp, Artificial Sequence
  Synthetic
ctgctctggcagatttcaac

SEQ ID NO: 1678 - DNA, 30 bp, Artificial Sequence
  Synthetic
ctgctctggcagatttcaaccgggcttgga

SEQ ID NO: 1679 - DNA, 25 bp, Artificial Sequence
  Synthetic
ctgctctggcagatttcaaccgggc

SEQ ID NO: 1680 - DNA, 20 bp, Artificial Sequence
  Synthetic
tgctctggcagatttcaacc

SEQ ID NO: 1681 - DNA, 30 bp, Artificial Sequence
  Synthetic
tgctctggcagatttcaaccgggcttggac

SEQ ID NO: 1682 - DNA, 21 bp, Artificial Sequence
  Synthetic
tgctctggcagatttcaaccg

SEQ ID NO: 1683 - DNA, 25 bp, Artificial Sequence
  Synthetic
tgctctggcagatttcaaccgggct

SEQ ID NO: 1684 - DNA, 20 bp, Artificial Sequence
  Synthetic
gctctggcagatttcaaccg

SEQ ID NO: 1685 - DNA, 30 bp, Artificial Sequence
  Synthetic
gctctggcagatttcaaccgggcttggaca

SEQ ID NO: 1686 - DNA, 25 bp, Artificial Sequence
  Synthetic
gctctggcagatttcaaccgggctt

SEQ ID NO: 1687 - DNA, 20 bp, Artificial Sequence
  Synthetic
ctctggcagatttcaaccgg

SEQ ID NO: 1688 - DNA, 30 bp, Artificial Sequence
  Synthetic
ctctggcagatttcaaccgggcttggacag

SEQ ID NO: 1689 - DNA, 35 bp, Artificial Sequence
  Synthetic
ctctggcagatttcaaccgggcttggacagaactt

SEQ ID NO: 1690 - DNA, 29 bp, Artificial Sequence
  Synthetic
ctctggcagatttcaaccgggcttggaca

SEQ ID NO: 1691 - DNA, 25 bp, Artificial Sequence
  Synthetic
ctctggcagatttcaaccgggcttg

SEQ ID NO: 1692 - DNA, 20 bp, Artificial Sequence
  Synthetic
tctggcagatttcaaccggg

SEQ ID NO: 1693 - DNA, 30 bp, Artificial Sequence
  Synthetic
tctggcagatttcaaccgggcttggacaga

SEQ ID NO: 1694 - DNA, 25 bp, Artificial Sequence
  Synthetic
tctggcagatttcaaccgggcttgg

SEQ ID NO: 1695 - DNA, 20 bp, Artificial Sequence
  Synthetic
ctggcagatttcaaccgggc

SEQ ID NO: 1696 - DNA, 30 bp, Artificial Sequence
  Synthetic
ctggcagatttcaaccgggcttggacagaa

SEQ ID NO: 1697 - DNA, 25 bp, Artificial Sequence
  Synthetic
ctggcagatttcaaccgggcttgga

SEQ ID NO: 1698 - DNA, 20 bp, Artificial Sequence
  Synthetic
tggcagatttcaaccgggct

SEQ ID NO: 1699 - DNA, 30 bp, Artificial Sequence
  Synthetic
tggcagatttcaaccgggcttggacagaac

SEQ ID NO: 1700 - DNA, 25 bp, Artificial Sequence
  Synthetic
tggcagatttcaaccgggcttggac

SEQ ID NO: 1701 - DNA, 20 bp, Artificial Sequence
  Synthetic
ggcagatttcaaccgggctt

SEQ ID NO: 1702 - DNA, 30 bp, Artificial Sequence
  Synthetic
ggcagatttcaaccgggcttggacagaact

SEQ ID NO: 1703 - DNA, 25 bp, Artificial Sequence
  Synthetic
ggcagatttcaaccgggcttggaca

SEQ ID NO: 1704 - DNA, 20 bp, Artificial Sequence
  Synthetic
gcagatttcaaccgggcttg

SEQ ID NO: 1705 - DNA, 30 bp, Artificial Sequence
  Synthetic
gcagatttcaaccgggcttggacagaactt

SEQ ID NO: 1706 - DNA, 25 bp, Artificial Sequence
  Synthetic
gcagatttcaaccgggcttggacag

SEQ ID NO: 1707 - DNA, 20 bp, Artificial Sequence
  Synthetic
cagatttcaaccgggcttgg

SEQ ID NO: 1708 - DNA, 30 bp, Artificial Sequence
  Synthetic
cagatttcaaccgggcttggacagaactta

SEQ ID NO: 1709 - DNA, 25 bp, Artificial Sequence
  Synthetic
cagatttcaaccgggcttggacaga

SEQ ID NO: 1710 - DNA, 20 bp, Artificial Sequence
  Synthetic
agatttcaaccgggcttgga

SEQ ID NO: 1711 - DNA, 30 bp, Artificial Sequence
  Synthetic
agatttcaaccgggcttggacagaacttac

SEQ ID NO: 1712 - DNA, 25 bp, Artificial Sequence
  Synthetic
agatttcaaccgggcttggacagaa

SEQ ID NO: 1713 - DNA, 33 bp, Artificial Sequence
  Synthetic
agatttcaaccgggcttggacagaacttaccga

SEQ ID NO: 1714 - DNA, 20 bp, Artificial Sequence
  Synthetic
gatttcaaccgggcttggac

SEQ ID NO: 1715 - DNA, 30 bp, Artificial Sequence
  Synthetic
gatttcaaccgggcttggacagaacttacc

SEQ ID NO: 1716 - DNA, 24 bp, Artificial Sequence
  Synthetic
gatttcaaccgggcttggacagaa

SEQ ID NO: 1717 - DNA, 21 bp, Artificial Sequence
  Synthetic
gatttcaaccgggcttggaca

SEQ ID NO: 1718 - DNA, 25 bp, Artificial Sequence
  Synthetic
gatttcaaccgggcttggacagaac

SEQ ID NO: 1719 - DNA, 20 bp, Artificial Sequence
  Synthetic
atttcaaccgggcttggaca

SEQ ID NO: 1720 - DNA, 30 bp, Artificial Sequence
  Synthetic
atttcaaccgggcttggacagaacttaccg

SEQ ID NO: 1721 - DNA, 25 bp, Artificial Sequence
  Synthetic
atttcaaccgggcttggacagaact

SEQ ID NO: 1722 - DNA, 26 bp, Artificial Sequence
  Synthetic
atttcaaccgggcttggacagaactt

SEQ ID NO: 1723 - DNA, 20 bp, Artificial Sequence
  Synthetic
tttcaaccgggcttggacag

SEQ ID NO: 1724 - DNA, 30 bp, Artificial Sequence
  Synthetic
tttcaaccgggcttggacagaacttaccga

SEQ ID NO: 1725 - DNA, 25 bp, Artificial Sequence
  Synthetic
tttcaaccgggcttggacagaactt

SEQ ID NO: 1726 - DNA, 20 bp, Artificial Sequence
  Synthetic
ttcaaccgggcttggacaga

SEQ ID NO: 1727 - DNA, 30 bp, Artificial Sequence
  Synthetic
ttcaaccgggcttggacagaacttaccgac

SEQ ID NO: 1728 - DNA, 25 bp, Artificial Sequence
  Synthetic
ttcaaccgggcttggacagaactta

SEQ ID NO: 1729 - DNA, 20 bp, Artificial Sequence
  Synthetic
tcaaccgggcttggacagaa

SEQ ID NO: 1730 - DNA, 30 bp, Artificial Sequence
  Synthetic
tcaaccgggcttggacagaacttaccgact

SEQ ID NO: 1731 - DNA, 25 bp, Artificial Sequence
  Synthetic
tcaaccgggcttggacagaacttac

SEQ ID NO: 1732 - DNA, 20 bp, Artificial Sequence
  Synthetic
caaccgggcttggacagaac

SEQ ID NO: 1733 - DNA, 30 bp, Artificial Sequence
  Synthetic
caaccgggcttggacagaacttaccgactg

SEQ ID NO: 1734 - DNA, 25 bp, Artificial Sequence
  Synthetic
caaccgggcttggacagaacttacc

SEQ ID NO: 1735 - DNA, 22 bp, Artificial Sequence
  Synthetic
caaccgggcttggacagaactt

SEQ ID NO: 1736 - DNA, 20 bp, Artificial Sequence
  Synthetic
aaccgggcttggacagaact

SEQ ID NO: 1737 - DNA, 30 bp, Artificial Sequence
  Synthetic
aaccgggcttggacagaacttaccgactgg

SEQ ID NO: 1738 - DNA, 25 bp, Artificial Sequence
  Synthetic
aaccgggcttggacagaacttaccg

SEQ ID NO: 1739 - DNA, 24 bp, Artificial Sequence
  Synthetic
aaccgggcttggacagaacttacc

SEQ ID NO: 1740 - DNA, 20 bp, Artificial Sequence
  Synthetic
accgggcttggacagaactt

SEQ ID NO: 1741 - DNA, 30 bp, Artificial Sequence
  Synthetic
accgggcttggacagaacttaccgactggc

SEQ ID NO: 1742 - DNA, 25 bp, Artificial Sequence
  Synthetic
accgggcttggacagaacttaccga

SEQ ID NO: 1743 - DNA, 20 bp, Artificial Sequence
  Synthetic
ccgggcttggacagaactta

SEQ ID NO: 1744 - DNA, 30 bp, Artificial Sequence
  Synthetic
ccgggcttggacagaacttaccgactggct

SEQ ID NO: 1745 - DNA, 25 bp, Artificial Sequence
  Synthetic
ccgggcttggacagaacttaccgac

SEQ ID NO: 1746 - DNA, 20 bp, Artificial Sequence
  Synthetic
cgggcttggacagaacttac

SEQ ID NO: 1747 - DNA, 30 bp, Artificial Sequence
  Synthetic
cgggcttggacagaacttaccgactggctt

SEQ ID NO: 1748 - DNA, 25 bp, Artificial Sequence
  Synthetic
cgggcttggacagaacttaccgact

SEQ ID NO: 1749 - DNA, 20 bp, Artificial Sequence
  Synthetic
gggcttggacagaacttacc

SEQ ID NO: 1750 - DNA, 30 bp, Artificial Sequence
  Synthetic
gggcttggacagaacttaccgactggcttt

SEQ ID NO: 1751 - DNA, 21 bp, Artificial Sequence
  Synthetic
gggcttggacagaacttaccg

SEQ ID NO: 1752 - DNA, 25 bp, Artificial Sequence
  Synthetic
gggcttggacagaacttaccgactg

SEQ ID NO: 1753 - DNA, 20 bp, Artificial Sequence
  Synthetic
ggcttggacagaacttaccg

SEQ ID NO: 1754 - DNA, 30 bp, Artificial Sequence
  Synthetic
ggcttggacagaacttaccgactggctttc

SEQ ID NO: 1755 - DNA, 25 bp, Artificial Sequence
  Synthetic
ggcttggacagaacttaccgactgg

SEQ ID NO: 1756 - DNA, 20 bp, Artificial Sequence
  Synthetic
gcttggacagaacttaccga

SEQ ID NO: 1757 - DNA, 30 bp, Artificial Sequence
  Synthetic
gcttggacagaacttaccgactggctttct

SEQ ID NO: 1758 - DNA, 18 bp, Artificial Sequence
  Synthetic
gcttggacagaacttacc

SEQ ID NO: 1759 - DNA, 25 bp, Artificial Sequence
  Synthetic
gcttggacagaacttaccgactggc

SEQ ID NO: 1760 - DNA, 20 bp, Artificial Sequence
  Synthetic
cttggacagaacttaccgac

SEQ ID NO: 1761 - DNA, 30 bp, Artificial Sequence
  Synthetic
cttggacagaacttaccgactggctttctc

SEQ ID NO: 1762 - DNA, 23 bp, Artificial Sequence
  Synthetic
cttggacagaacttaccgactgg

SEQ ID NO: 1763 - DNA, 25 bp, Artificial Sequence
  Synthetic
cttggacagaacttaccgactggct

SEQ ID NO: 1764 - DNA, 20 bp, Artificial Sequence
  Synthetic
ttggacagaacttaccgact

SEQ ID NO: 1765 - DNA, 30 bp, Artificial Sequence
  Synthetic
ttggacagaacttaccgactggctttctct

SEQ ID NO: 1766 - DNA, 25 bp, Artificial Sequence
  Synthetic
ttggacagaacttaccgactggctt

SEQ ID NO: 1767 - DNA, 19 bp, Artificial Sequence
  Synthetic
ttggacagaacttaccgac

SEQ ID NO: 1768 - DNA, 20 bp, Artificial Sequence
  Synthetic
tggacagaacttaccgactg

SEQ ID NO: 1769 - DNA, 30 bp, Artificial Sequence
  Synthetic
tggacagaacttaccgactggctttctctg

SEQ ID NO: 1770 - DNA, 25 bp, Artificial Sequence
  Synthetic
tggacagaacttaccgactggcttt

SEQ ID NO: 1771 - DNA, 21 bp, Artificial Sequence
  Synthetic
tggacagaacttaccgactgg

SEQ ID NO: 1772 - DNA, 20 bp, Artificial Sequence
  Synthetic
ggacagaacttaccgactgg

SEQ ID NO: 1773 - DNA, 30 bp, Artificial Sequence
  Synthetic
ggacagaacttaccgactggctttctctgc

SEQ ID NO: 1774 - DNA, 25 bp, Artificial Sequence
  Synthetic
ggacagaacttaccgactggctttc

SEQ ID NO: 1775 - DNA, 20 bp, Artificial Sequence
  Synthetic
gacagaacttaccgactggc

SEQ ID NO: 1776 - DNA, 30 bp, Artificial Sequence
  Synthetic
gacagaacttaccgactggctttctctgct

SEQ ID NO: 1777 - DNA, 26 bp, Artificial Sequence
  Synthetic
gacagaacttaccgactggctttctc

SEQ ID NO: 1778 - DNA, 25 bp, Artificial Sequence
  Synthetic
gacagaacttaccgactggctttct

SEQ ID NO: 1779 - DNA, 20 bp, Artificial Sequence
  Synthetic
acagaacttaccgactggct

SEQ ID NO: 1780 - DNA, 30 bp, Artificial Sequence
  Synthetic
acagaacttaccgactggctttctctgctt

SEQ ID NO: 1781 - DNA, 25 bp, Artificial Sequence
  Synthetic
acagaacttaccgactggctttctc

SEQ ID NO: 1782 - DNA, 20 bp, Artificial Sequence
  Synthetic
cagaacttaccgactggctt

SEQ ID NO: 1783 - DNA, 30 bp, Artificial Sequence
  Synthetic
cagaacttaccgactggctttctctgcttg

SEQ ID NO: 1784 - DNA, 25 bp, Artificial Sequence
  Synthetic
cagaacttaccgactggctttctct

SEQ ID NO: 1785 - DNA, 20 bp, Artificial Sequence
  Synthetic
agaacttaccgactggcttt

SEQ ID NO: 1786 - DNA, 30 bp, Artificial Sequence
  Synthetic
agaacttaccgactggctttctctgcttga

SEQ ID NO: 1787 - DNA, 18 bp, Artificial Sequence
  Synthetic
agaacttaccgactggct

SEQ ID NO: 1788 - DNA, 21 bp, Artificial Sequence
  Synthetic
agaacttaccgactggctttc

SEQ ID NO: 1789 - DNA, 25 bp, Artificial Sequence
  Synthetic
agaacttaccgactggctttctctg

SEQ ID NO: 1790 - DNA, 20 bp, Artificial Sequence
  Synthetic
gaacttaccgactggctttc

SEQ ID NO: 1791 - DNA, 30 bp, Artificial Sequence
  Synthetic
gaacttaccgactggctttctctgcttgat

SEQ ID NO: 1792 - DNA, 23 bp, Artificial Sequence
  Synthetic
gaacttaccgactggctttctct

SEQ ID NO: 1793 - DNA, 25 bp, Artificial Sequence
  Synthetic
gaacttaccgactggctttctctgc

SEQ ID NO: 1794 - DNA, 20 bp, Artificial Sequence
  Synthetic
aacttaccgactggctttct

SEQ ID NO: 1795 - DNA, 30 bp, Artificial Sequence
  Synthetic
aacttaccgactggctttctctgcttgatc

SEQ ID NO: 1796 - DNA, 25 bp, Artificial Sequence
  Synthetic
aacttaccgactggctttctctgct

SEQ ID NO: 1797 - DNA, 20 bp, Artificial Sequence
  Synthetic
acttaccgactggctttctc

SEQ ID NO: 1798 - DNA, 30 bp, Artificial Sequence
  Synthetic
acttaccgactggctttctctgcttgatca

SEQ ID NO: 1799 - DNA, 25 bp, Artificial Sequence
  Synthetic
acttaccgactggctttctctgctt

SEQ ID NO: 1800 - DNA, 20 bp, Artificial Sequence
  Synthetic
cttaccgactggctttctct

SEQ ID NO: 1801 - DNA, 30 bp, Artificial Sequence
  Synthetic
cttaccgactggctttctctgcttgatcaa

SEQ ID NO: 1802 - DNA, 25 bp, Artificial Sequence
  Synthetic
cttaccgactggctttctctgcttg

SEQ ID NO: 1803 - DNA, 20 bp, Artificial Sequence
  Synthetic
ttaccgactggctttctctg

SEQ ID NO: 1804 - DNA, 30 bp, Artificial Sequence
  Synthetic
ttaccgactggctttctctgcttgatcaag

SEQ ID NO: 1805 - DNA, 25 bp, Artificial Sequence
  Synthetic
ttaccgactggctttctctgcttga

SEQ ID NO: 1806 - DNA, 21 bp, Artificial Sequence
  Synthetic
ttaccgactggctttctctgc

SEQ ID NO: 1807 - DNA, 20 bp, Artificial Sequence
  Synthetic
taccgactggctttctctgc

SEQ ID NO: 1808 - DNA, 30 bp, Artificial Sequence
  Synthetic
taccgactggctttctctgcttgatcaagt

SEQ ID NO: 1809 - DNA, 25 bp, Artificial Sequence
  Synthetic
taccgactggctttctctgcttgat

SEQ ID NO: 1810 - DNA, 20 bp, Artificial Sequence
  Synthetic
accgactggctttctctgct

SEQ ID NO: 1811 - DNA, 30 bp, Artificial Sequence
  Synthetic
accgactggctttctctgcttgatcaagtt

SEQ ID NO: 1812 - DNA, 25 bp, Artificial Sequence
  Synthetic
accgactggctttctctgcttgatc

SEQ ID NO: 1813 - DNA, 20 bp, Artificial Sequence
  Synthetic
ccgactggctttctctgctt

SEQ ID NO: 1814 - DNA, 30 bp, Artificial Sequence
  Synthetic
ccgactggctttctctgcttgatcaagtta

SEQ ID NO: 1815 - DNA, 45 bp, Artificial Sequence
  Synthetic
ccgactggctttctctgcttgatcaagttataaaatcacagaggg

SEQ ID NO: 1816 - DNA, 25 bp, Artificial Sequence
  Synthetic
ccgactggctttctctgcttgatca

SEQ ID NO: 1817 - DNA, 20 bp, Artificial Sequence
  Synthetic
cgactggctttctctgcttg

SEQ ID NO: 1818 - DNA, 30 bp, Artificial Sequence
  Synthetic
cgactggctttctctgcttgatcaagttat

SEQ ID NO: 1819 - DNA, 25 bp, Artificial Sequence
  Synthetic
cgactggctttctctgcttgatcaa

SEQ ID NO: 1820 - DNA, 20 bp, Artificial Sequence
  Synthetic
gactggctttctctgcttga

SEQ ID NO: 1821 - DNA, 30 bp, Artificial Sequence
  Synthetic
gactggctttctctgcttgatcaagttata

SEQ ID NO: 1822 - DNA, 25 bp, Artificial Sequence
  Synthetic
gactggctttctctgcttgatcaag

SEQ ID NO: 1823 - DNA, 21 bp, Artificial Sequence
  Synthetic
gactggctttctctgcttgat

SEQ ID NO: 1824 - DNA, 20 bp, Artificial Sequence
  Synthetic
actggctttctctgcttgat

SEQ ID NO: 1825 - DNA, 30 bp, Artificial Sequence
  Synthetic
actggctttctctgcttgatcaagttataa

SEQ ID NO: 1826 - DNA, 25 bp, Artificial Sequence
  Synthetic
actggctttctctgcttgatcaagt

SEQ ID NO: 1827 - DNA, 20 bp, Artificial Sequence
  Synthetic
ctggctttctctgcttgatc

SEQ ID NO: 1828 - DNA, 30 bp, Artificial Sequence
  Synthetic
ctggctttctctgcttgatcaagttataaa

SEQ ID NO: 1829 - DNA, 23 bp, Artificial Sequence
  Synthetic
ctggctttctctgcttgatcaag

SEQ ID NO: 1830 - DNA, 25 bp, Artificial Sequence
  Synthetic
ctggctttctctgcttgatcaagtt

SEQ ID NO: 1831 - DNA, 20 bp, Artificial Sequence
  Synthetic
tggctttctctgcttgatca

SEQ ID NO: 1832 - DNA, 30 bp, Artificial Sequence
  Synthetic
tggctttctctgcttgatcaagttataaaa

SEQ ID NO: 1833 - DNA, 26 bp, Artificial Sequence
  Synthetic
tggctttctctgcttgatcaagttat

SEQ ID NO: 1834 - DNA, 25 bp, Artificial Sequence
  Synthetic
tggctttctctgcttgatcaagtta

SEQ ID NO: 1835 - DNA, 20 bp, Artificial Sequence
  Synthetic
ggctttctctgcttgatcaa

SEQ ID NO: 1836 - DNA, 30 bp, Artificial Sequence
  Synthetic
ggctttctctgcttgatcaagttataaaat

SEQ ID NO: 1837 - DNA, 25 bp, Artificial Sequence
  Synthetic
ggctttctctgcttgatcaagttat

SEQ ID NO: 1838 - DNA, 20 bp, Artificial Sequence
  Synthetic
gctttctctgcttgatcaag

SEQ ID NO: 1839 - DNA, 30 bp, Artificial Sequence
  Synthetic
gctttctctgcttgatcaagttataaaatc

SEQ ID NO: 1840 - DNA, 25 bp, Artificial Sequence
  Synthetic
gctttctctgcttgatcaagttata

SEQ ID NO: 1841 - DNA, 20 bp, Artificial Sequence
  Synthetic
ctttctctgcttgatcaagt

SEQ ID NO: 1842 - DNA, 30 bp, Artificial Sequence
  Synthetic
ctttctctgcttgatcaagttataaaatca

SEQ ID NO: 1843 - DNA, 25 bp, Artificial Sequence
  Synthetic
ctttctctgcttgatcaagttataa

SEQ ID NO: 1844 - DNA, 20 bp, Artificial Sequence
  Synthetic
tttctctgcttgatcaagtt

SEQ ID NO: 1845 - DNA, 30 bp, Artificial Sequence
  Synthetic
tttctctgcttgatcaagttataaaatcac

SEQ ID NO: 1846 - DNA, 25 bp, Artificial Sequence
  Synthetic
tttctctgcttgatcaagttataaa

SEQ ID NO: 1847 - DNA, 20 bp, Artificial Sequence
  Synthetic
ttctctgcttgatcaagtta

SEQ ID NO: 1848 - DNA, 30 bp, Artificial Sequence
  Synthetic
ttctctgcttgatcaagttataaaatcaca

SEQ ID NO: 1849 - DNA, 25 bp, Artificial Sequence
  Synthetic
ttctctgcttgatcaagttataaaa

SEQ ID NO: 1850 - DNA, 20 bp, Artificial Sequence
  Synthetic
tctctgcttgatcaagttat

SEQ ID NO: 1851 - DNA, 30 bp, Artificial Sequence
  Synthetic
tctctgcttgatcaagttataaaatcacag

SEQ ID NO: 1852 - DNA, 25 bp, Artificial Sequence
  Synthetic
tctctgcttgatcaagttataaaat

SEQ ID NO: 1853 - DNA, 30 bp, Artificial Sequence
  Synthetic
ctctgcttgatcaagttataaaatcacaga

SEQ ID NO: 1854 - DNA, 30 bp, Artificial Sequence
  Synthetic
tctgcttgatcaagttataaaatcacagag

SEQ ID NO: 1855 - DNA, 30 bp, Artificial Sequence
  Synthetic
ctgcttgatcaagttataaaatcacagagg

SEQ ID NO: 1856 - DNA, 30 bp, Artificial Sequence
  Synthetic
tgcttgatcaagttataaaatcacagaggg

SEQ ID NO: 1857 - DNA, 30 bp, Artificial Sequence
  Synthetic
gcttgatcaagttataaaatcacagagggt

SEQ ID NO: 1858 - DNA, 30 bp, Artificial Sequence
  Synthetic
cttgatcaagttataaaatcacagagggtg

SEQ ID NO: 1859 - DNA, 25 bp, Artificial Sequence
  Synthetic
cttgatcaagttataaaatcacaga

SEQ ID NO: 1860 - DNA, 30 bp, Artificial Sequence
  Synthetic
ttgatcaagttataaaatcacagagggtga

SEQ ID NO: 1861 - DNA, 25 bp, Artificial Sequence
  Synthetic
ttgatcaagttataaaatcacagag

SEQ ID NO: 1862 - DNA, 30 bp, Artificial Sequence
  Synthetic
tgatcaagttataaaatcacagagggtgat

SEQ ID NO: 1863 - DNA, 25 bp, Artificial Sequence
  Synthetic
tgatcaagttataaaatcacagagg

SEQ ID NO: 1864 - DNA, 30 bp, Artificial Sequence
  Synthetic
gatcaagttataaaatcacagagggtgatg

SEQ ID NO: 1865 - DNA, 25 bp, Artificial Sequence
  Synthetic
gatcaagttataaaatcacagaggg

SEQ ID NO: 1866 - DNA, 30 bp, Artificial Sequence
  Synthetic
atcaagttataaaatcacagagggtgatgg

SEQ ID NO: 1867 - DNA, 23 bp, Artificial Sequence
  Synthetic
atcaagttataaaatcacagagg

SEQ ID NO: 1868 - DNA, 26 bp, Artificial Sequence
  Synthetic
atcaagttataaaatcacagagggtg

SEQ ID NO: 1869 - DNA, 25 bp, Artificial Sequence
  Synthetic
atcaagttataaaatcacagagggt

SEQ ID NO: 1870 - DNA, 20 bp, Artificial Sequence
  Synthetic
tcaagttataaaatcacaga

SEQ ID NO: 1871 - DNA, 30 bp, Artificial Sequence
  Synthetic
tcaagttataaaatcacagagggtgatggt

SEQ ID NO: 1872 - DNA, 21 bp, Artificial Sequence
  Synthetic
tcaagttataaaatcacagag

SEQ ID NO: 1873 - DNA, 25 bp, Artificial Sequence
  Synthetic
tcaagttataaaatcacagagggtg

SEQ ID NO: 1874 - DNA, 20 bp, Artificial Sequence
  Synthetic
caagttataaaatcacagag

SEQ ID NO: 1875 - DNA, 30 bp, Artificial Sequence
  Synthetic
caagttataaaatcacagagggtgatggtg

SEQ ID NO: 1876 - DNA, 21 bp, Artificial Sequence
  Synthetic
caagttataaaatcacagagg

SEQ ID NO: 1877 - DNA, 25 bp, Artificial Sequence
  Synthetic
caagttataaaatcacagagggtga

SEQ ID NO: 1878 - DNA, 20 bp, Artificial Sequence
  Synthetic
aagttataaaatcacagagg

SEQ ID NO: 1879 - DNA, 30 bp, Artificial Sequence
  Synthetic
aagttataaaatcacagagggtgatggtgg

SEQ ID NO: 1880 - DNA, 23 bp, Artificial Sequence
  Synthetic
aagttataaaatcacagagggtg

SEQ ID NO: 1881 - DNA, 25 bp, Artificial Sequence
  Synthetic
aagttataaaatcacagagggtgat

SEQ ID NO: 1882 - DNA, 20 bp, Artificial Sequence
  Synthetic
agttataaaatcacagaggg

SEQ ID NO: 1883 - DNA, 30 bp, Artificial Sequence
  Synthetic
agttataaaatcacagagggtgatggtggg

SEQ ID NO: 1884 - DNA, 25 bp, Artificial Sequence
  Synthetic
agttataaaatcacagagggtgatg

SEQ ID NO: 1885 - DNA, 20 bp, Artificial Sequence
  Synthetic
gttataaaatcacagagggt

SEQ ID NO: 1886 - DNA, 30 bp, Artificial Sequence
  Synthetic
gttataaaatcacagagggtgatggtgggt

SEQ ID NO: 1887 - DNA, 25 bp, Artificial Sequence
  Synthetic
gttataaaatcacagagggtgatgg

SEQ ID NO: 1888 - DNA, 20 bp, Artificial Sequence
  Synthetic
ttataaaatcacagagggtg

SEQ ID NO: 1889 - DNA, 30 bp, Artificial Sequence
  Synthetic
ttataaaatcacagagggtgatggtgggtg

SEQ ID NO: 1890 - DNA, 25 bp, Artificial Sequence
  Synthetic
ttataaaatcacagagggtgatggt

SEQ ID NO: 1891 - DNA, 20 bp, Artificial Sequence
  Synthetic
tataaaatcacagagggtga

SEQ ID NO: 1892 - DNA, 30 bp, Artificial Sequence
  Synthetic
tataaaatcacagagggtgatggtgggtga

SEQ ID NO: 1893 - DNA, 25 bp, Artificial Sequence
  Synthetic
tataaaatcacagagggtgatggtg

SEQ ID NO: 1894 - DNA, 20 bp, Artificial Sequence
  Synthetic
ataaaatcacagagggtgat

SEQ ID NO: 1895 - DNA, 30 bp, Artificial Sequence
  Synthetic
ataaaatcacagagggtgatggtgggtgac

SEQ ID NO: 1896 - DNA, 40 bp, Artificial Sequence
  Synthetic
ataaaatcacagagggtgatggtgggtgaccttgaggata

SEQ ID NO: 1897 - DNA, 19 bp, Artificial Sequence
  Synthetic
ataaaatcacagagggtga

SEQ ID NO: 1898 - DNA, 25 bp, Artificial Sequence
  Synthetic
ataaaatcacagagggtgatggtgg

SEQ ID NO: 1899 - DNA, 20 bp, Artificial Sequence
  Synthetic
taaaatcacagagggtgatg

SEQ ID NO: 1900 - DNA, 30 bp, Artificial Sequence
  Synthetic
taaaatcacagagggtgatggtgggtgacc

SEQ ID NO: 1901 - DNA, 25 bp, Artificial Sequence
  Synthetic
taaaatcacagagggtgatggtggg

SEQ ID NO: 1902 - DNA, 20 bp, Artificial Sequence
  Synthetic
aaaatcacagagggtgatgg

SEQ ID NO: 1903 - DNA, 30 bp, Artificial Sequence
  Synthetic
aaaatcacagagggtgatggtgggtgacct

SEQ ID NO: 1904 - DNA, 25 bp, Artificial Sequence
  Synthetic
aaaatcacagagggtgatggtgggt

SEQ ID NO: 1905 - DNA, 20 bp, Artificial Sequence
  Synthetic
aaatcacagagggtgatggt

SEQ ID NO: 1906 - DNA, 30 bp, Artificial Sequence
  Synthetic
aaatcacagagggtgatggtgggtgacctt

SEQ ID NO: 1907 - DNA, 21 bp, Artificial Sequence
  Synthetic
aaatcacagagggtgatggtg

SEQ ID NO: 1908 - DNA, 25 bp, Artificial Sequence
  Synthetic
aaatcacagagggtgatggtgggtg

SEQ ID NO: 1909 - DNA, 20 bp, Artificial Sequence
  Synthetic
aatcacagagggtgatggtg

SEQ ID NO: 1910 - DNA, 30 bp, Artificial Sequence
  Synthetic
aatcacagagggtgatggtgggtgaccttg

SEQ ID NO: 1911 - DNA, 25 bp, Artificial Sequence
  Synthetic
aatcacagagggtgatggtgggtga

SEQ ID NO: 1912 - DNA, 20 bp, Artificial Sequence
  Synthetic
atcacagagggtgatggtgg

SEQ ID NO: 1913 - DNA, 30 bp, Artificial Sequence
  Synthetic
atcacagagggtgatggtgggtgaccttga

SEQ ID NO: 1914 - DNA, 25 bp, Artificial Sequence
  Synthetic
atcacagagggtgatggtgggtgac

SEQ ID NO: 1915 - DNA, 20 bp, Artificial Sequence
  Synthetic
tcacagagggtgatggtggg

SEQ ID NO: 1916 - DNA, 30 bp, Artificial Sequence
  Synthetic
tcacagagggtgatggtgggtgaccttgag

SEQ ID NO: 1917 - DNA, 25 bp, Artificial Sequence
  Synthetic
tcacagagggtgatggtgggtgacc

SEQ ID NO: 1918 - DNA, 20 bp, Artificial Sequence
  Synthetic
cacagagggtgatggtgggt

SEQ ID NO: 1919 - DNA, 30 bp, Artificial Sequence
  Synthetic
cacagagggtgatggtgggtgaccttgagg

SEQ ID NO: 1920 - DNA, 21 bp, Artificial Sequence
  Synthetic
cacagagggtgatggtgggtg

SEQ ID NO: 1921 - DNA, 25 bp, Artificial Sequence
  Synthetic
cacagagggtgatggtgggtgacct

SEQ ID NO: 1922 - DNA, 20 bp, Artificial Sequence
  Synthetic
acagagggtgatggtgggtg

SEQ ID NO: 1923 - DNA, 30 bp, Artificial Sequence
  Synthetic
acagagggtgatggtgggtgaccttgagga

SEQ ID NO: 1924 - DNA, 25 bp, Artificial Sequence
  Synthetic
acagagggtgatggtgggtgacctt

SEQ ID NO: 1925 - DNA, 33 bp, Artificial Sequence
  Synthetic
acagagggtgatggtgggtgaccttgaggatat

SEQ ID NO: 1926 - DNA, 26 bp, Artificial Sequence
  Synthetic
acagagggtgatggtgggtgaccttg

SEQ ID NO: 1927 - DNA, 20 bp, Artificial Sequence
  Synthetic
cagagggtgatggtgggtga

SEQ ID NO: 1928 - DNA, 30 bp, Artificial Sequence
  Synthetic
cagagggtgatggtgggtgaccttgaggat

SEQ ID NO: 1929 - DNA, 25 bp, Artificial Sequence
  Synthetic
cagagggtgatggtgggtgaccttg

SEQ ID NO: 1930 - DNA, 30 bp, Artificial Sequence
  Synthetic
agagggtgatggtgggtgaccttgaggata

SEQ ID NO: 1931 - DNA, 30 bp, Artificial Sequence
  Synthetic
gagggtgatggtgggtgaccttgaggatat

SEQ ID NO: 1932 - DNA, 30 bp, Artificial Sequence
  Synthetic
agggtgatggtgggtgaccttgaggatatc

SEQ ID NO: 1933 - DNA, 25 bp, Artificial Sequence
  Synthetic
agggtgatggtgggtgaccttgagg

SEQ ID NO: 1934 - DNA, 30 bp, Artificial Sequence
  Synthetic
gggtgatggtgggtgaccttgaggatatca

SEQ ID NO: 1935 - DNA, 25 bp, Artificial Sequence
  Synthetic
gggtgatggtgggtgaccttgagga

SEQ ID NO: 1936 - DNA, 30 bp, Artificial Sequence
  Synthetic
ggtgatggtgggtgaccttgaggatatcaa

SEQ ID NO: 1937 - DNA, 25 bp, Artificial Sequence
  Synthetic
ggtgatggtgggtgaccttgaggat

SEQ ID NO: 1938 - DNA, 30 bp, Artificial Sequence
  Synthetic
gtgatggtgggtgaccttgaggatatcaac

SEQ ID NO: 1939 - DNA, 25 bp, Artificial Sequence
  Synthetic
gtgatggtgggtgaccttgaggata

SEQ ID NO: 1940 - DNA, 30 bp, Artificial Sequence
  Synthetic
tgatggtgggtgaccttgaggatatcaacg

SEQ ID NO: 1941 - DNA, 25 bp, Artificial Sequence
  Synthetic
tgatggtgggtgaccttgaggatat

SEQ ID NO: 1942 - DNA, 20 bp, Artificial Sequence
  Synthetic
gatggtgggtgaccttgagg

SEQ ID NO: 1943 - DNA, 30 bp, Artificial Sequence
  Synthetic
gatggtgggtgaccttgaggatatcaacga

SEQ ID NO: 1944 - DNA, 25 bp, Artificial Sequence
  Synthetic
gatggtgggtgaccttgaggatatc

SEQ ID NO: 1945 - DNA, 20 bp, Artificial Sequence
  Synthetic
atggtgggtgaccttgagga

SEQ ID NO: 1946 - DNA, 30 bp, Artificial Sequence
  Synthetic
atggtgggtgaccttgaggatatcaacgag

SEQ ID NO: 1947 - DNA, 25 bp, Artificial Sequence
  Synthetic
atggtgggtgaccttgaggatatca

SEQ ID NO: 1948 - DNA, 20 bp, Artificial Sequence
  Synthetic
tggtgggtgaccttgaggat

SEQ ID NO: 1949 - DNA, 30 bp, Artificial Sequence
  Synthetic
tggtgggtgaccttgaggatatcaacgaga

SEQ ID NO: 1950 - DNA, 25 bp, Artificial Sequence
  Synthetic
tggtgggtgaccttgaggatatcaa

SEQ ID NO: 1951 - DNA, 20 bp, Artificial Sequence
  Synthetic
ggtgggtgaccttgaggata

SEQ ID NO: 1952 - DNA, 30 bp, Artificial Sequence
  Synthetic
ggtgggtgaccttgaggatatcaacgagat

SEQ ID NO: 1953 - DNA, 19 bp, Artificial Sequence
  Synthetic
ggtgggtgaccttgaggat

SEQ ID NO: 1954 - DNA, 23 bp, Artificial Sequence
  Synthetic
ggtgggtgaccttgaggatatca

SEQ ID NO: 1955 - DNA, 25 bp, Artificial Sequence
  Synthetic
ggtgggtgaccttgaggatatcaac

SEQ ID NO: 1956 - DNA, 20 bp, Artificial Sequence
  Synthetic
gtgggtgaccttgaggatat

SEQ ID NO: 1957 - DNA, 30 bp, Artificial Sequence
  Synthetic
gtgggtgaccttgaggatatcaacgagatg

SEQ ID NO: 1958 - DNA, 25 bp, Artificial Sequence
  Synthetic
gtgggtgaccttgaggatatcaacg

SEQ ID NO: 1959 - DNA, 20 bp, Artificial Sequence
  Synthetic
tgggtgaccttgaggatatc

SEQ ID NO: 1960 - DNA, 30 bp, Artificial Sequence
  Synthetic
tgggtgaccttgaggatatcaacgagatga

SEQ ID NO: 1961 - DNA, 25 bp, Artificial Sequence
  Synthetic
tgggtgaccttgaggatatcaacga

SEQ ID NO: 1962 - DNA, 20 bp, Artificial Sequence
  Synthetic
gggtgaccttgaggatatca

SEQ ID NO: 1963 - DNA, 30 bp, Artificial Sequence
  Synthetic
gggtgaccttgaggatatcaacgagatgat

SEQ ID NO: 1964 - DNA, 21 bp, Artificial Sequence
  Synthetic
gggtgaccttgaggatatcaa

SEQ ID NO: 1965 - DNA, 25 bp, Artificial Sequence
  Synthetic
gggtgaccttgaggatatcaacgag

SEQ ID NO: 1966 - DNA, 20 bp, Artificial Sequence
  Synthetic
ggtgaccttgaggatatcaa

SEQ ID NO: 1967 - DNA, 30 bp, Artificial Sequence
  Synthetic
ggtgaccttgaggatatcaacgagatgatc

SEQ ID NO: 1968 - DNA, 19 bp, Artificial Sequence
  Synthetic
ggtgaccttgaggatatca

SEQ ID NO: 1969 - DNA, 26 bp, Artificial Sequence
  Synthetic
ggtgaccttgaggatatcaacgagat

SEQ ID NO: 1970 - DNA, 25 bp, Artificial Sequence
  Synthetic
ggtgaccttgaggatatcaacgaga

SEQ ID NO: 1971 - DNA, 20 bp, Artificial Sequence
  Synthetic
gtgaccttgaggatatcaac

SEQ ID NO: 1972 - DNA, 30 bp, Artificial Sequence
  Synthetic
gtgaccttgaggatatcaacgagatgatca

SEQ ID NO: 1973 - DNA, 25 bp, Artificial Sequence
  Synthetic
gtgaccttgaggatatcaacgagat

SEQ ID NO: 1974 - DNA, 20 bp, Artificial Sequence
  Synthetic
tgaccttgaggatatcaacg

SEQ ID NO: 1975 - DNA, 30 bp, Artificial Sequence
  Synthetic
tgaccttgaggatatcaacgagatgatcat

SEQ ID NO: 1976 - DNA, 34 bp, Artificial Sequence
  Synthetic
tgaccttgaggatatcaacgagatgatcatcaag

SEQ ID NO: 1977 - DNA, 37 bp, Artificial Sequence
  Synthetic
tgaccttgaggatatcaacgagatgatcatcaagcag

SEQ ID NO: 1978 - DNA, 25 bp, Artificial Sequence
  Synthetic
tgaccttgaggatatcaacgagatg

SEQ ID NO: 1979 - DNA, 20 bp, Artificial Sequence
  Synthetic
gaccttgaggatatcaacga

SEQ ID NO: 1980 - DNA, 30 bp, Artificial Sequence
  Synthetic
gaccttgaggatatcaacgagatgatcatc

SEQ ID NO: 1981 - DNA, 25 bp, Artificial Sequence
  Synthetic
gaccttgaggatatcaacgagatga

SEQ ID NO: 1982 - DNA, 20 bp, Artificial Sequence
  Synthetic
accttgaggatatcaacgag

SEQ ID NO: 1983 - DNA, 30 bp, Artificial Sequence
  Synthetic
accttgaggatatcaacgagatgatcatca

SEQ ID NO: 1984 - DNA, 25 bp, Artificial Sequence
  Synthetic
accttgaggatatcaacgagatgat

SEQ ID NO: 1985 - DNA, 20 bp, Artificial Sequence
  Synthetic
ccttgaggatatcaacgaga

SEQ ID NO: 1986 - DNA, 30 bp, Artificial Sequence
  Synthetic
ccttgaggatatcaacgagatgatcatcaa

SEQ ID NO: 1987 - DNA, 25 bp, Artificial Sequence
  Synthetic
ccttgaggatatcaacgagatgatc

SEQ ID NO: 1988 - DNA, 20 bp, Artificial Sequence
  Synthetic
cttgaggatatcaacgagat

SEQ ID NO: 1989 - DNA, 30 bp, Artificial Sequence
  Synthetic
cttgaggatatcaacgagatgatcatcaag

SEQ ID NO: 1990 - DNA, 25 bp, Artificial Sequence
  Synthetic
cttgaggatatcaacgagatgatca

SEQ ID NO: 1991 - DNA, 20 bp, Artificial Sequence
  Synthetic
ttgaggatatcaacgagatg

SEQ ID NO: 1992 - DNA, 30 bp, Artificial Sequence
  Synthetic
ttgaggatatcaacgagatgatcatcaagc

SEQ ID NO: 1993 - DNA, 33 bp, Artificial Sequence
  Synthetic
ttgaggatatcaacgagatgatcatcaagcaga

SEQ ID NO: 1994 - DNA, 22 bp, Artificial Sequence
  Synthetic
ttgaggatatcaacgagatgat

SEQ ID NO: 1995 - DNA, 25 bp, Artificial Sequence
  Synthetic
ttgaggatatcaacgagatgatcat

SEQ ID NO: 1996 - DNA, 20 bp, Artificial Sequence
  Synthetic
tgaggatatcaacgagatga

SEQ ID NO: 1997 - DNA, 30 bp, Artificial Sequence
  Synthetic
tgaggatatcaacgagatgatcatcaagca

SEQ ID NO: 1998 - DNA, 25 bp, Artificial Sequence
  Synthetic
tgaggatatcaacgagatgatcatc

SEQ ID NO: 1999 - DNA, 20 bp, Artificial Sequence
  Synthetic
gaggatatcaacgagatgat

SEQ ID NO: 2000 - DNA, 30 bp, Artificial Sequence
  Synthetic
gaggatatcaacgagatgatcatcaagcag

SEQ ID NO: 2001 - DNA, 21 bp, Artificial Sequence
  Synthetic
gaggatatcaacgagatgatc

SEQ ID NO: 2002 - DNA, 25 bp, Artificial Sequence
  Synthetic
gaggatatcaacgagatgatcatca

SEQ ID NO: 2003 - DNA, 20 bp, Artificial Sequence
  Synthetic
aggatatcaacgagatgatc

SEQ ID NO: 2004 - DNA, 30 bp, Artificial Sequence
  Synthetic
aggatatcaacgagatgatcatcaagcaga

SEQ ID NO: 2005 - DNA, 25 bp, Artificial Sequence
  Synthetic
aggatatcaacgagatgatcatcaa

SEQ ID NO: 2006 - DNA, 20 bp, Artificial Sequence
  Synthetic
ggatatcaacgagatgatca

SEQ ID NO: 2007 - DNA, 30 bp, Artificial Sequence
  Synthetic
ggatatcaacgagatgatcatcaagcagaa

SEQ ID NO: 2008 - DNA, 25 bp, Artificial Sequence
  Synthetic
ggatatcaacgagatgatcatcaag

SEQ ID NO: 2009 - DNA, 20 bp, Artificial Sequence
  Synthetic
gatatcaacgagatgatcat

SEQ ID NO: 2010 - DNA, 30 bp, Artificial Sequence
  Synthetic
gatatcaacgagatgatcatcaagcagaag

SEQ ID NO: 2011 - DNA, 25 bp, Artificial Sequence
  Synthetic
gatatcaacgagatgatcatcaagc

SEQ ID NO: 2012 - DNA, 20 bp, Artificial Sequence
  Synthetic
atatcaacgagatgatcatc

SEQ ID NO: 2013 - DNA, 30 bp, Artificial Sequence
  Synthetic
atatcaacgagatgatcatcaagcagaagg

SEQ ID NO: 2014 - DNA, 27 bp, Artificial Sequence
  Synthetic
atatcaacgagatgatcatcaagcaga

SEQ ID NO: 2015 - DNA, 29 bp, Artificial Sequence
  Synthetic
atatcaacgagatgatcatcaagcagaag

SEQ ID NO: 2016 - DNA, 25 bp, Artificial Sequence
  Synthetic
atatcaacgagatgatcatcaagca

SEQ ID NO: 2017 - DNA, 20 bp, Artificial Sequence
  Synthetic
tatcaacgagatgatcatca

SEQ ID NO: 2018 - DNA, 30 bp, Artificial Sequence
  Synthetic
tatcaacgagatgatcatcaagcagaaggt

SEQ ID NO: 2019 - DNA, 25 bp, Artificial Sequence
  Synthetic
tatcaacgagatgatcatcaagcag

SEQ ID NO: 2020 - DNA, 20 bp, Artificial Sequence
  Synthetic
atcaacgagatgatcatcaa

SEQ ID NO: 2021 - DNA, 30 bp, Artificial Sequence
  Synthetic
atcaacgagatgatcatcaagcagaaggta

SEQ ID NO: 2022 - DNA, 25 bp, Artificial Sequence
  Synthetic
atcaacgagatgatcatcaagcaga

SEQ ID NO: 2023 - DNA, 20 bp, Artificial Sequence
  Synthetic
tcaacgagatgatcatcaag

SEQ ID NO: 2024 - DNA, 30 bp, Artificial Sequence
  Synthetic
tcaacgagatgatcatcaagcagaaggtat

SEQ ID NO: 2025 - DNA, 26 bp, Artificial Sequence
  Synthetic
tcaacgagatgatcatcaagcagaag

SEQ ID NO: 2026 - DNA, 25 bp, Artificial Sequence
  Synthetic
tcaacgagatgatcatcaagcagaa

SEQ ID NO: 2027 - DNA, 20 bp, Artificial Sequence
  Synthetic
caacgagatgatcatcaagc

SEQ ID NO: 2028 - DNA, 30 bp, Artificial Sequence
  Synthetic
caacgagatgatcatcaagcagaaggtatg

SEQ ID NO: 2029 - DNA, 22 bp, Artificial Sequence
  Synthetic
caacgagatgatcatcaagcag

SEQ ID NO: 2030 - DNA, 26 bp, Artificial Sequence
  Synthetic
caacgagatgatcatcaagcagaagg

SEQ ID NO: 2031 - DNA, 25 bp, Artificial Sequence
  Synthetic
caacgagatgatcatcaagcagaag

SEQ ID NO: 2032 - DNA, 20 bp, Artificial Sequence
  Synthetic
aacgagatgatcatcaagca

SEQ ID NO: 2033 - DNA, 30 bp, Artificial Sequence
  Synthetic
aacgagatgatcatcaagcagaaggtatga

SEQ ID NO: 2034 - DNA, 21 bp, Artificial Sequence
  Synthetic
aacgagatgatcatcaagcag

SEQ ID NO: 2035 - DNA, 20 bp, Artificial Sequence
  Synthetic
acgagatgatcatcaagcag

SEQ ID NO: 2036 - DNA, 30 bp, Artificial Sequence
  Synthetic
acgagatgatcatcaagcagaaggtatgag

SEQ ID NO: 2037 - DNA, 21 bp, Artificial Sequence
  Synthetic
acgagatgatcatcaagcaga

SEQ ID NO: 2038 - DNA, 25 bp, Artificial Sequence
  Synthetic
acgagatgatcatcaagcagaaggt

SEQ ID NO: 2039 - DNA, 20 bp, Artificial Sequence
  Synthetic
cgagatgatcatcaagcaga

SEQ ID NO: 2040 - DNA, 30 bp, Artificial Sequence
  Synthetic
cgagatgatcatcaagcagaaggtatgaga

SEQ ID NO: 2041 - DNA, 20 bp, Artificial Sequence
  Synthetic
gagatgatcatcaagcagaa

SEQ ID NO: 2042 - DNA, 30 bp, Artificial Sequence
  Synthetic
gagatgatcatcaagcagaaggtatgagaa

SEQ ID NO: 2043 - DNA, 21 bp, Artificial Sequence
  Synthetic
gagatgatcatcaagcagaag

SEQ ID NO: 2044 - DNA, 18 bp, Artificial Sequence
  Synthetic
gagatgatcatcaagcag

SEQ ID NO: 2045 - DNA, 19 bp, Artificial Sequence
  Synthetic
gagatgatcatcaagcaga

SEQ ID NO: 2046 - DNA, 29 bp, Artificial Sequence
  Synthetic
gagatgatcatcaagcagaaggtatgaga

SEQ ID NO: 2047 - DNA, 6 bp, Artificial Sequence
  Synthetic
tccatc

SEQ ID NO: 2048 - DNA, 6 bp, Artificial Sequence
  Synthetic
tacatc

SEQ ID NO: 2049 - DNA, 7 bp, Artificial Sequence
  Synthetic
tcacatc

SEQ ID NO: 2050 - DNA, 6 bp, Artificial Sequence
  Synthetic
cacatc

SEQ ID NO: 2051 - DNA, 7 bp, Artificial Sequence
  Synthetic
tcactct

SEQ ID NO: 2052 - DNA, 7 bp, Artificial Sequence
  Synthetic
cactctt

SEQ ID NO: 2053 - DNA, 7 bp, Artificial Sequence
  Synthetic
ttccaag

SEQ ID NO: 2054 - DNA, 6 bp, Artificial Sequence
  Synthetic
tgcctc

SEQ ID NO: 2055 - DNA, 7 bp, Artificial Sequence
  Synthetic
cctcaac

SEQ ID NO: 2056 - DNA, 7 bp, Artificial Sequence
  Synthetic
caacaag

SEQ ID NO: 2057 - DNA, 8 bp, Artificial Sequence
  Synthetic
ggccacct

SEQ ID NO: 2058 - DNA, 7 bp, Artificial Sequence
  Synthetic
cctaaag

SEQ ID NO: 2059 - DNA, 8 bp, Artificial Sequence
  Synthetic
gactaaag

SEQ ID NO: 2060 - DNA, 7 bp, Artificial Sequence
  Synthetic
ttacatc

SEQ ID NO: 2061 - DNA, 7 bp, Artificial Sequence
  Synthetic
tcaaatg

SEQ ID NO: 2062 - DNA, 7 bp, Artificial Sequence
  Synthetic
tctcaac

SEQ ID NO: 2063 - DNA, 7 bp, Artificial Sequence
  Synthetic
ttacaaa

SEQ ID NO: 2064 - DNA, 8 bp, Artificial Sequence
  Synthetic
gttctctg

SEQ ID NO: 2065 - DNA, 8 bp, Artificial Sequence
  Synthetic
ggcctata

SEQ ID NO: 2066 - DNA, 7 bp, Artificial Sequence
  Synthetic
tctcagc

SEQ ID NO: 2067 - DNA, 7 bp, Artificial Sequence
  Synthetic
ctcagca

SEQ ID NO: 2068 - DNA, 8 bp, Artificial Sequence
  Synthetic
caccactg

SEQ ID NO: 2069 - DNA, 7 bp, Artificial Sequence
  Synthetic
ccactgt

SEQ ID NO: 2070 - DNA, 7 bp, Artificial Sequence
  Synthetic
cgaagaa

SEQ ID NO: 2071 - DNA, 7 bp, Artificial Sequence
  Synthetic
cgccctc

SEQ ID NO: 2072 - DNA, 8 bp, Artificial Sequence
  Synthetic
gccctctg

SEQ ID NO: 2073 - DNA, 7 bp, Artificial Sequence
  Synthetic
agccgga

SEQ ID NO: 2074 - DNA, 7 bp, Artificial Sequence
  Synthetic
tttgaag

SEQ ID NO: 2075 - DNA, 7 bp, Artificial Sequence
  Synthetic
gggacgc

SEQ ID NO: 2076 - DNA, 8 bp, Artificial Sequence
  Synthetic
ggacgctg

SEQ ID NO: 2077 - DNA, 7 bp, Artificial Sequence
  Synthetic
cgctgga

SEQ ID NO: 2078 - DNA, 7 bp, Artificial Sequence
  Synthetic
ctcccag

SEQ ID NO: 2079 - DNA, 7 bp, Artificial Sequence
  Synthetic
tcccagc

SEQ ID NO: 2080 - DNA, 7 bp, Artificial Sequence
  Synthetic
cccagct

SEQ ID NO: 2081 - DNA, 7 bp, Artificial Sequence
  Synthetic
cagctgg

SEQ ID NO: 2082 - DNA, 7 bp, Artificial Sequence
  Synthetic
tcaaaag

SEQ ID NO: 2083 - DNA, 7 bp, Artificial Sequence
  Synthetic
ctagagg

SEQ ID NO: 2084 - DNA, 7 bp, Artificial Sequence
  Synthetic
tagagga

SEQ ID NO: 2085 - DNA, 6 bp, Artificial Sequence
  Synthetic
tgaata

SEQ ID NO: 2086 - DNA, 7 bp, Artificial Sequence
  Synthetic
ctccgaa

SEQ ID NO: 2087 - DNA, 7 bp, Artificial Sequence
  Synthetic
ataaaag

SEQ ID NO: 2088 - DNA, 8 bp, Artificial Sequence
  Synthetic
gtctacaa

SEQ ID NO: 2089 - DNA, 7 bp, Artificial Sequence
  Synthetic
ctacaac

SEQ ID NO: 2090 - DNA, 7 bp, Artificial Sequence
  Synthetic
acaaagc

SEQ ID NO: 2091 - DNA, 7 bp, Artificial Sequence
  Synthetic
gctcagg

SEQ ID NO: 2092 - DNA, 7 bp, Artificial Sequence
  Synthetic
ctcaggt

SEQ ID NO: 2093 - DNA, 6 bp, Artificial Sequence
  Synthetic
ttcata

SEQ ID NO: 2094 - DNA, 7 bp, Artificial Sequence
  Synthetic
tcatagc

SEQ ID NO: 2095 - DNA, 7 bp, Artificial Sequence
  Synthetic
agacagc

SEQ ID NO: 2096 - DNA, 6 bp, Artificial Sequence
  Synthetic
agcagc

SEQ ID NO: 2097 - DNA, 6 bp, Artificial Sequence
  Synthetic
tgcaac

SEQ ID NO: 2098 - DNA, 8 bp, Artificial Sequence
  Synthetic
cgcctgtg

SEQ ID NO: 2099 - DNA, 7 bp, Artificial Sequence
  Synthetic
ctgtgga

SEQ ID NO: 2100 - DNA, 6 bp, Artificial Sequence
  Synthetic
tgtgga

SEQ ID NO: 2101 - DNA, 8 bp, Artificial Sequence
  Synthetic
agctacag

SEQ ID NO: 2102 - DNA, 7 bp, Artificial Sequence
  Synthetic
ctacagg

SEQ ID NO: 2103 - DNA, 7 bp, Artificial Sequence
  Synthetic
tacagga

SEQ ID NO: 2104 - DNA, 7 bp, Artificial Sequence
  Synthetic
tctctcc

SEQ ID NO: 2105 - DNA, 8 bp, Artificial Sequence
  Synthetic
ctctccca

SEQ ID NO: 2106 - DNA, 8 bp, Artificial Sequence
  Synthetic
gatttcca

SEQ ID NO: 2107 - DNA, 7 bp, Artificial Sequence
  Synthetic
ccaatgg

SEQ ID NO: 2108 - DNA, 7 bp, Artificial Sequence
  Synthetic
gtacaag

SEQ ID NO: 2109 - DNA, 8 bp, Artificial Sequence
  Synthetic
gaccgaca

SEQ ID NO: 2110 - DNA, 7 bp, Artificial Sequence
  Synthetic
ccgacaa

SEQ ID NO: 2111 - DNA, 7 bp, Artificial Sequence
  Synthetic
cgacaag

SEQ ID NO: 2112 - DNA, 7 bp, Artificial Sequence
  Synthetic
tgacaga

SEQ ID NO: 2113 - DNA, 7 bp, Artificial Sequence
  Synthetic
cggcgtt

SEQ ID NO: 2114 - DNA, 7 bp, Artificial Sequence
  Synthetic
tcagtgg

SEQ ID NO: 2115 - DNA, 8 bp, Artificial Sequence
  Synthetic
ggctaaca

SEQ ID NO: 2116 - DNA, 7 bp, Artificial Sequence
  Synthetic
acagaag

SEQ ID NO: 2117 - DNA, 7 bp, Artificial Sequence
  Synthetic
tctcaga

SEQ ID NO: 2118 - DNA, 7 bp, Artificial Sequence
  Synthetic
ctcagaa

SEQ ID NO: 2119 - DNA, 8 bp, Artificial Sequence
  Synthetic
aattcctg

SEQ ID NO: 2120 - DNA, 7 bp, Artificial Sequence
  Synthetic
ctgagaa

SEQ ID NO: 2121 - DNA, 8 bp, Artificial Sequence
  Synthetic
gtatctta

SEQ ID NO: 2122 - DNA, 8 bp, Artificial Sequence
  Synthetic
gaactcca

SEQ ID NO: 2123 - DNA, 8 bp, Artificial Sequence
  Synthetic
aactccag

SEQ ID NO: 2124 - DNA, 7 bp, Artificial Sequence
  Synthetic
ctccagg

SEQ ID NO: 2125 - DNA, 7 bp, Artificial Sequence
  Synthetic
cagcggc

SEQ ID NO: 2126 - DNA, 6 bp, Artificial Sequence
  Synthetic
agcggc

SEQ ID NO: 2127 - DNA, 7 bp, Artificial Sequence
  Synthetic
tcagaac

SEQ ID NO: 2128 - DNA, 8 bp, Artificial Sequence
  Synthetic
gaacattg

SEQ ID NO: 2129 - DNA, 7 bp, Artificial Sequence
  Synthetic
tgaatgc

SEQ ID NO: 2130 - DNA, 8 bp, Artificial Sequence
  Synthetic
gaatgcaa

SEQ ID NO: 2131 - DNA, 7 bp, Artificial Sequence
  Synthetic
caactgg

SEQ ID NO: 2132 - DNA, 7 bp, Artificial Sequence
  Synthetic
ctgggga

SEQ ID NO: 2133 - DNA, 7 bp, Artificial Sequence
  Synthetic
attcagc

SEQ ID NO: 2134 - DNA, 8 bp, Artificial Sequence
  Synthetic
tgccagta

SEQ ID NO: 2135 - DNA, 8 bp, Artificial Sequence
  Synthetic
gtattcta

SEQ ID NO: 2136 - DNA, 6 bp, Artificial Sequence
  Synthetic
tgaatc

SEQ ID NO: 2137 - DNA, 7 bp, Artificial Sequence
  Synthetic
ctgcggt

SEQ ID NO: 2138 - DNA, 6 bp, Artificial Sequence
  Synthetic
tgcggt

SEQ ID NO: 2139 - DNA, 7 bp, Artificial Sequence
  Synthetic
cggtggc

SEQ ID NO: 2140 - DNA, 7 bp, Artificial Sequence
  Synthetic
tggcagg

SEQ ID NO: 2141 - DNA, 7 bp, Artificial Sequence
  Synthetic
ggcagga

SEQ ID NO: 2142 - DNA, 7 bp, Artificial Sequence
  Synthetic
aggaggt

SEQ ID NO: 2143 - DNA, 8 bp, Artificial Sequence
  Synthetic
ggtctgca

SEQ ID NO: 2144 - DNA, 8 bp, Artificial Sequence
  Synthetic
gtctgcaa

SEQ ID NO: 2145 - DNA, 7 bp, Artificial Sequence
  Synthetic
cagctgt

SEQ ID NO: 2146 - DNA, 7 bp, Artificial Sequence
  Synthetic
cagacag

SEQ ID NO: 2147 - DNA, 7 bp, Artificial Sequence
  Synthetic
ctagaag

SEQ ID NO: 2148 - DNA, 7 bp, Artificial Sequence
  Synthetic
acaaaag

SEQ ID NO: 2149 - DNA, 8 bp, Artificial Sequence
  Synthetic
gttttatg

SEQ ID NO: 2150 - DNA, 7 bp, Artificial Sequence
  Synthetic
tttatgg

SEQ ID NO: 2151 - DNA, 8 bp, Artificial Sequence
  Synthetic
ggttggag

SEQ ID NO: 2152 - DNA, 7 bp, Artificial Sequence
  Synthetic
tggagga

SEQ ID NO: 2153 - DNA, 8 bp, Artificial Sequence
  Synthetic
gtatccca

SEQ ID NO: 2154 - DNA, 7 bp, Artificial Sequence
  Synthetic
cccactt

SEQ ID NO: 2155 - DNA, 7 bp, Artificial Sequence
  Synthetic
ccacttg

SEQ ID NO: 2156 - DNA, 7 bp, Artificial Sequence
  Synthetic
cacttga

SEQ ID NO: 2157 - DNA, 7 bp, Artificial Sequence
  Synthetic
ctaaaag

SEQ ID NO: 2158 - DNA, 7 bp, Artificial Sequence
  Synthetic
agtcaag

SEQ ID NO: 2159 - DNA, 7 bp, Artificial Sequence
  Synthetic
ttagaag

SEQ ID NO: 2160 - DNA, 8 bp, Artificial Sequence
  Synthetic
gatctgag

SEQ ID NO: 2161 - DNA, 7 bp, Artificial Sequence
  Synthetic
tctgagc

SEQ ID NO: 2162 - DNA, 7 bp, Artificial Sequence
  Synthetic
ctgagct

SEQ ID NO: 2163 - DNA, 8 bp, Artificial Sequence
  Synthetic
gagctctg

SEQ ID NO: 2164 - DNA, 7 bp, Artificial Sequence
  Synthetic
ctgagtg

SEQ ID NO: 2165 - DNA, 7 bp, Artificial Sequence
  Synthetic
tgagtgg

SEQ ID NO: 2166 - DNA, 7 bp, Artificial Sequence
  Synthetic
ttacttc

SEQ ID NO: 2167 - DNA, 6 bp, Artificial Sequence
  Synthetic
tacttc

SEQ ID NO: 2168 - DNA, 7 bp, Artificial Sequence
  Synthetic
cttcaag

SEQ ID NO: 2169 - DNA, 7 bp, Artificial Sequence
  Synthetic
ctgaggg

SEQ ID NO: 2170 - DNA, 7 bp, Artificial Sequence
  Synthetic
cagcctg

SEQ ID NO: 2171 - DNA, 7 bp, Artificial Sequence
  Synthetic
ctgacct

SEQ ID NO: 2172 - DNA, 8 bp, Artificial Sequence
  Synthetic
agctcctg

SEQ ID NO: 2173 - DNA, 7 bp, Artificial Sequence
  Synthetic
ctcctgg

SEQ ID NO: 2174 - DNA, 7 bp, Artificial Sequence
  Synthetic
ctgacca

SEQ ID NO: 2175 - DNA, 8 bp, Artificial Sequence
  Synthetic
gaccacta

SEQ ID NO: 2176 - DNA, 7 bp, Artificial Sequence
  Synthetic
ccactat

SEQ ID NO: 2177 - DNA, 7 bp, Artificial Sequence
  Synthetic
ctattgg

SEQ ID NO: 2178 - DNA, 6 bp, Artificial Sequence
  Synthetic
tgcagg

SEQ ID NO: 2179 - DNA, 8 bp, Artificial Sequence
  Synthetic
gaacagag

SEQ ID NO: 2180 - DNA, 7 bp, Artificial Sequence
  Synthetic
cagaggc

SEQ ID NO: 2181 - DNA, 6 bp, Artificial Sequence
  Synthetic
ggcgtc

SEQ ID NO: 2182 - DNA, 8 bp, Artificial Sequence
  Synthetic
cgtcccca

SEQ ID NO: 2183 - DNA, 8 bp, Artificial Sequence
  Synthetic
gtccccag

SEQ ID NO: 2184 - DNA, 7 bp, Artificial Sequence
  Synthetic
ccccagt

SEQ ID NO: 2185 - DNA, 7 bp, Artificial Sequence
  Synthetic
cccagtt

SEQ ID NO: 2186 - DNA, 7 bp, Artificial Sequence
  Synthetic
ttaccgc

SEQ ID NO: 2187 - DNA, 8 bp, Artificial Sequence
  Synthetic
taccgctg

SEQ ID NO: 2188 - DNA, 7 bp, Artificial Sequence
  Synthetic
ctgccca

SEQ ID NO: 2189 - DNA, 8 bp, Artificial Sequence
  Synthetic
gaccagca

SEQ ID NO: 2190 - DNA, 8 bp, Artificial Sequence
  Synthetic
ggctagaa

SEQ ID NO: 2191 - DNA, 6 bp, Artificial Sequence
  Synthetic
tacgga

SEQ ID NO: 2192 - DNA, 8 bp, Artificial Sequence
  Synthetic
ggatcgaa

SEQ ID NO: 2193 - DNA, 8 bp, Artificial Sequence
  Synthetic
gaattcag

SEQ ID NO: 2194 - DNA, 7 bp, Artificial Sequence
  Synthetic
cagtggg

SEQ ID NO: 2195 - DNA, 7 bp, Artificial Sequence
  Synthetic
aaccgga

SEQ ID NO: 2196 - DNA, 7 bp, Artificial Sequence
  Synthetic
cggaggc

SEQ ID NO: 2197 - DNA, 7 bp, Artificial Sequence
  Synthetic
ttaaagg

SEQ ID NO: 2198 - DNA, 8 bp, Artificial Sequence
  Synthetic
ggattcaa

SEQ ID NO: 2199 - DNA, 7 bp, Artificial Sequence
  Synthetic
acaatgg

SEQ ID NO: 2200 - DNA, 8 bp, Artificial Sequence
  Synthetic
ggctggaa

SEQ ID NO: 2201 - DNA, 7 bp, Artificial Sequence
  Synthetic
ctgagca

SEQ ID NO: 2202 - DNA, 7 bp, Artificial Sequence
  Synthetic
agcaggt

SEQ ID NO: 2203 - DNA, 7 bp, Artificial Sequence
  Synthetic
tcttagg

SEQ ID NO: 2204 - DNA, 7 bp, Artificial Sequence
  Synthetic
cttagga

SEQ ID NO: 2205 - DNA, 7 bp, Artificial Sequence
  Synthetic
ggacagg

SEQ ID NO: 2206 - DNA, 7 bp, Artificial Sequence
  Synthetic
gacaggc

SEQ ID NO: 2207 - DNA, 8 bp, Artificial Sequence
  Synthetic
ggccagag

SEQ ID NO: 2208 - DNA, 7 bp, Artificial Sequence
  Synthetic
ccagagc

SEQ ID NO: 2209 - DNA, 6 bp, Artificial Sequence
  Synthetic
tgagtc

SEQ ID NO: 2210 - DNA, 7 bp, Artificial Sequence
  Synthetic
aggaggg

SEQ ID NO: 2211 - DNA, 8 bp, Artificial Sequence
  Synthetic
ggtcccta

SEQ ID NO: 2212 - DNA, 7 bp, Artificial Sequence
  Synthetic
acagtag

SEQ ID NO: 2213 - DNA, 7 bp, Artificial Sequence
  Synthetic
ccaaaag

SEQ ID NO: 2214 - DNA, 7 bp, Artificial Sequence
  Synthetic
cgagagg

SEQ ID NO: 2215 - DNA, 8 bp, Artificial Sequence
  Synthetic
ggctgctt

SEQ ID NO: 2216 - DNA, 8 bp, Artificial Sequence
  Synthetic
gattactg

SEQ ID NO: 2217 - DNA, 7 bp, Artificial Sequence
  Synthetic
ttactgc

SEQ ID NO: 2218 - DNA, 7 bp, Artificial Sequence
  Synthetic
ccccctg

SEQ ID NO: 2219 - DNA, 7 bp, Artificial Sequence
  Synthetic
cccctgg

SEQ ID NO: 2220 - DNA, 7 bp, Artificial Sequence
  Synthetic
ccctgga

SEQ ID NO: 2221 - DNA, 8 bp, Artificial Sequence
  Synthetic
gtttcttg

SEQ ID NO: 2222 - DNA, 7 bp, Artificial Sequence
  Synthetic
tttcttg

SEQ ID NO: 2223 - DNA, 7 bp, Artificial Sequence
  Synthetic
tgcctgg

SEQ ID NO: 2224 - DNA, 8 bp, Artificial Sequence
  Synthetic
ggcttaca

SEQ ID NO: 2225 - DNA, 7 bp, Artificial Sequence
  Synthetic
ttacaga

SEQ ID NO: 2226 - DNA, 6 bp, Artificial Sequence
  Synthetic
tacaga

SEQ ID NO: 2227 - DNA, 7 bp, Artificial Sequence
  Synthetic
ctgccaa

SEQ ID NO: 2228 - DNA, 8 bp, Artificial Sequence
  Synthetic
tgccaatg

SEQ ID NO: 2229 - DNA, 8 bp, Artificial Sequence
  Synthetic
gtcctaca

SEQ ID NO: 2230 - DNA, 8 bp, Artificial Sequence
  Synthetic
ggatgcta

SEQ ID NO: 2231 - DNA, 7 bp, Artificial Sequence
  Synthetic
ctacccg

SEQ ID NO: 2232 - DNA, 8 bp, Artificial Sequence
  Synthetic
tacccgta

SEQ ID NO: 2233 - DNA, 8 bp, Artificial Sequence
  Synthetic
ggctccta

SEQ ID NO: 2234 - DNA, 7 bp, Artificial Sequence
  Synthetic
agactcc

SEQ ID NO: 2235 - DNA, 8 bp, Artificial Sequence
  Synthetic
gactccaa

SEQ ID NO: 2236 - DNA, 7 bp, Artificial Sequence
  Synthetic
ctccaag

SEQ ID NO: 2237 - DNA, 7 bp, Artificial Sequence
  Synthetic
ccaaggg

SEQ ID NO: 2238 - DNA, 7 bp, Artificial Sequence
  Synthetic
ctgatga

SEQ ID NO: 2239 - DNA, 13993 bp, Homo sapiens
tcctggcatcagttactgtgttgactcactcagtgttgggatcactcactttccccctacaggactcagatctgggaggcaattaccttcggagaaaaacgaataggaaaaactgaagtgttactttttttaaagctgctgaagtttgttggtttctcattgtttttaagcctactggagcaataaagtttgaagaacttttaccaggttttttttatcgctgccttgatatacacttttcaaaatgctttggtgggaagaagtagaggactgttatgaaagagaagatgttcaaaagaaaacattcacaaaatgggtaaatgcacaattttctaagtttgggaagcagcatattgagaacctcttcagtgacctacaggatgggaggcgcctcctagacctcctcgaaggcctgacagggcaaaaactgccaaaagaaaaaggatccacaagagttcatgccctgaacaatgtcaacaaggcactgcgggttttgcagaacaataatgttgatttagtgaatattggaagtactgacatcgtagatggaaatcataaactgactcttggtttgatttggaatataatcctccactggcaggtcaaaaatgtaatgaaaaatatcatggctggattgcaacaaaccaacagtgaaaagattctcctgagctgggtccgacaatcaactcgtaattatccacaggttaatgtaatcaacttcaccaccagctggtctgatggcctggctttgaatgctctcatccatagtcataggccagacctatttgactggaatagtgtggtttgccagcagtcagccacacaacgactggaacatgcattcaacatcgccagatatcaattaggcatagagaaactactcgatcctgaagatgttgataccacctatccagataagaagtccatcttaatgtacatcacatcactcttccaagttttgcctcaacaagtgagcattgaagccatccaggaagtggaaatgttgccaaggccacctaaagtgactaaagaagaacattttcagttacatcatcaaatgcactattctcaacagatcacggtcagtctagcacagggatatgagagaacttcttcccctaagcctcgattcaagagctatgcctacacacaggctgcttatgtcaccacctctgaccctacacggagcccatttccttcacagcatttggaagctcctgaagacaagtcatttggcagttcattgatggagagtgaagtaaacctggaccgttatcaaacagctttagaagaagtattatcgtggcttctttctgctgaggacacattgcaagcacaaggagagatttctaatgatgtggaagtggtgaaagaccagtttcatactcatgaggggtacatgatggatttgacagcccatcagggccgggttggtaatattctacaattgggaagtaagctgattggaacaggaaaattatcagaagatgaagaaactgaagtacaagagcagatgaatctcctaaattcaagatgggaatgcctcagggtagctagcatggaaaaacaaagcaatttacatagagttttaatggatctccagaatcagaaactgaaagagttgaatgactggctaacaaaaacagaagaaagaacaaggaaaatggaggaagagcctcttggacctgatcttgaagacctaaaacgccaagtacaacaacataaggtgcttcaagaagatctagaacaagaacaagtcagggtcaattctctcactcacatggtggtggtagttgatgaatctagtggagatcacgcaactgctgctttggaagaacaacttaaggtattgggagatcgatgggcaaacatctgtagatggacagaagaccgctgggttcttttacaagacatccttctcaaatggcaacgtcttactgaagaacagtgcctttttagtgcatggctttcagaaaaagaagatgcagtgaacaagattcacacaactggctttaaagatcaaaatgaaatgttatcaagtcttcaaaaactggccgttttaaaagcggatctagaaaagaaaaagcaatccatgggcaaactgtattcactcaaacaagatcttctttcaacactgaagaataagtcagtgacccagaagacggaagcatggctggataactttgcccggtgttgggataatttagtccaaaaacttgaaaagagtacagcacagatttcacaggctgtcaccaccactcagccatcactaacacagacaactgtaatggaaacagtaactacggtgaccacaagggaacagatcctggtaaagcatgctcaagaggaacttccaccaccacctccccaaaagaagaggcagattactgtggattctgaaattaggaaaaggttggatgttgatataactgaacttcacagctggattactcgctcagaagctgtgttgcagagtcctgaatttgcaatctttcggaaggaaggcaacttctcagacttaaaagaaaaagtcaatgccatagagcgagaaaaagctgagaagttcagaaaactgcaagatgccagcagatcagctcaggccctggtggaacagatggtgaatgagggtgttaatgcagatagcatcaaacaagcctcagaacaactgaacagccggtggatcgaattctgccagttgctaagtgagagacttaactggctggagtatcagaacaacatcatcgctttctataatcagctacaacaattggagcagatgacaactactgctgaaaactggttgaaaatccaacccaccaccccatcagagccaacagcaattaaaagtcagttaaaaatttgtaaggatgaagtcaaccggctatcaggtcttcaacctcaaattgaacgattaaaaattcaaagcatagccctgaaagagaaaggacaaggacccatgttcctggatgcagactttgtggcctttacaaatcattttaagcaagtcttttctgatgtgcaggccagagagaaagagctacagacaatttttgacactttgccaccaatgcgctatcaggagaccatgagtgccatcaggacatgggtccagcagtcagaaaccaaactctccatacctcaacttagtgtcaccgactatgaaatcatggagcagagactcggggaattgcaggctttacaaagttctctgcaagagcaacaaagtggcctatactatctcagcaccactgtgaaagagatgtcgaagaaagcgccctctgaaattagccggaaatatcaatcagaatttgaagaaattgagggacgctggaagaagctctcctcccagctggttgagcattgtcaaaagctagaggagcaaatgaataaactccgaaaaattcagaatcacatacaaaccctgaagaaatggatggctgaagttgatgtttttctgaaggaggaatggcctgcccttggggattcagaaattctaaaaaagcagctgaaacagtgcagacttttagtcagtgatattcagacaattcagcccagtctaaacagtgtcaatgaaggtgggcagaagataaagaatgaagcagagccagagtttgcttcgagacttgagacagaactcaaagaacttaacactcagtgggatcacatgtgccaacaggtctatgccagaaaggaggccttgaagggaggtttggagaaaactgtaagcctccagaaagatctatcagagatgcacgaatggatgacacaagctgaagaagagtatcttgagagagattttgaatataaaactccagatgaattacagaaagcagttgaagagatgaagagagctaaagaagaggcccaacaaaaagaagcgaaagtgaaactccttactgagtctgtaaatagtgtcatagctcaagctccacctgtagcacaagaggccttaaaaaaggaacttgaaactctaaccaccaactaccagtggctctgcactaggctgaatgggaaatgcaagactttggaagaagtttgggcatgttggcatgagttattgtcatacttggagaaagcaaacaagtggctaaatgaagtagaatttaaacttaaaaccactgaaaacattcctggcggagctgaggaaatctctgaggtgctagattcacttgaaaatttgatgcgacattcagaggataacccaaatcagattcgcatattggcacagaccctaacagatggcggagtcatggatgagctaatcaatgaggaacttgagacatttaattctcgttggagggaactacatgaagaggctgtaaggaggcaaaagttgcttgaacagagcatccagtctgcccaggagactgaaaaatccttacacttaatccaggagtccctcacattcattgacaagcagttggcagcttatattgcagacaaggtggacgcagctcaaatgcctcaggaagcccagaaaatccaatctgatttgacaagtcatgagatcagtttagaagaaatgaagaaacataatcaggggaaggaggctgcccaaagagtcctgtctcagattgatgttgcacagaaaaaattacaagatgtctccatgaagtttcgattattccagaaaccagccaattttgagcagcgtctacaagaaagtaagatgattttagatgaagtgaagatgcacttgcctgcattggaaacaaagagtgtggaacaggaagtagtacagtcacagctaaatcattgtgtgaacttgtataaaagtctgagtgaagtgaagtctgaagtggaaatggtgataaagactggacgtcagattgtacagaaaaagcagacggaaaatcccaaagaacttgatgaaagagtaacagctttgaaattgcattataatgagctgggagcaaaggtaacagaaagaaagcaacagttggagaaatgcttgaaattgtcccgtaagatgcgaaaggaaatgaatgtcttgacagaatggctggcagctacagatatggaattgacaaagagatcagcagttgaaggaatgcctagtaatttggattctgaagttgcctggggaaaggctactcaaaaagagattgagaaacagaaggtgcacctgaagagtatcacagaggtaggagaggccttgaaaacagttttgggcaagaaggagacgttggtggaagataaactcagtcttctgaatagtaactggatagctgtcacctcccgagcagaagagtggttaaatcttttgttggaataccagaaacacatggaaacttttgaccagaatgtggaccacatcacaaagtggatcattcaggctgacacacttttggatgaatcagagaaaaagaaaccccagcaaaaagaagacgtgcttaagcgtttaaaggcagaactgaatgacatacgcccaaaggtggactctacacgtgaccaagcagcaaacttgatggcaaaccgcggtgaccactgcaggaaattagtagagccccaaatctcagagctcaaccatcgatttgcagccatttcacacagaattaagactggaaaggcctccattcctttgaaggaattggagcagtttaactcagatatacaaaaattgcttgaaccactggaggctgaaattcagcagggggtgaatctgaaagaggaagacttcaataaagatatgaatgaagacaatgagggtactgtaaaagaattgttgcaaagaggagacaacttacaacaaagaatcacagatgagagaaagcgagaggaaataaagataaaacagcagctgttacagacaaaacataatgctctcaaggatttgaggtctcaaagaagaaaaaaggctctagaaatttctcatcagtggtatcagtacaagaggcaggctgatgatctcctgaaatgcttggatgacattgaaaaaaaattagccagcctacctgagcccagagatgaaaggaaaataaaggaaattgatcgggaattgcagaagaagaaagaggagctgaatgcagtgcgtaggcaagctgagggcttgtctgaggatggggccgcaatggcagtggagccaactcagatccagctcagcaagcgctggcgggaaattgagagcaaatttgctcagtttcgaagactcaactttgcacaaattcacactgtccgtgaagaaacgatgatggtgatgactgaagacatgcctttggaaatttcttatgtgccttctacttatttgactgaaatcactcatgtctcacaagccctattagaagtggaacaacttctcaatgctcctgacctctgtgctaaggactttgaagatctctttaagcaagaggagtctctgaagaatataaaagatagtctacaacaaagctcaggtcggattgacattattcatagcaagaagacagcagcattgcaaagtgcaacgcctgtggaaagggtgaagctacaggaagctctctcccagcttgatttccaatgggaaaaagttaacaaaatgtacaaggaccgacaagggcgatttgacagatctgttgagaaatggcggcgttttcattatgatataaagatatttaatcagtggctaacagaagctgaacagtttctcagaaagacacaaattcctgagaattgggaacatgctaaatacaaatggtatcttaaggaactccaggatggcattgggcagcggcaaactgttgtcagaacattgaatgcaactggggaagaaataattcagcaatcctcaaaaacagatgccagtattctacaggaaaaattgggaagcctgaatctgcggtggcaggaggtctgcaaacagctgtcagacagaaaaaagaggctagaagaacaaaagaatatcttgtcagaatttcaaagagatttaaatgaatttgttttatggttggaggaagcagataacattgctagtatcccacttgaacctggaaaagagcagcaactaaaagaaaagcttgagcaagtcaagttactggtggaagagttgcccctgcgccagggaattctcaaacaattaaatgaaactggaggacccgtgcttgtaagtgctcccataagcccagaagagcaagataaacttgaaaataagctcaagcagacaaatctccagtggataaaggtttccagagctttacctgagaaacaaggagaaattgaagctcaaataaaagaccttgggcagcttgaaaaaaagcttgaagaccttgaagagcagttaaatcatctgctgctgtggttatctcctattaggaatcagttggaaatttataaccaaccaaaccaagaaggaccatttgacgttcaggaaactgaaatagcagttcaagctaaacaaccggatgtggaagagattttgtctaaagggcagcatttgtacaaggaaaaaccagccactcagccagtgaagaggaagttagaagatctgagctctgagtggaaggcggtaaaccgtttacttcaagagctgagggcaaagcagcctgacctagctcctggactgaccactattggagcctctcctactcagactgttactctggtgacacaacctgtggttactaaggaaactgccatctccaaactagaaatgccatcttccttgatgttggaggtacctgctctggcagatttcaaccgggcttggacagaacttaccgactggctttctctgcttgatcaagttataaaatcacagagggtgatggtgggtgaccttgaggatatcaacgagatgatcatcaagcagaaggcaacaatgcaggatttggaacagaggcgtccccagttggaagaactcattaccgctgcccaaaatttgaaaaacaagaccagcaatcaagaggctagaacaatcattacggatcgaattgaaagaattcagaatcagtgggatgaagtacaagaacaccttcagaaccggaggcaacagttgaatgaaatgttaaaggattcaacacaatggctggaagctaaggaagaagctgagcaggtcttaggacaggccagagccaagcttgagtcatggaaggagggtccctatacagtagatgcaatccaaaagaaaatcacagaaaccaagcagttggccaaagacctccgccagtggcagacaaatgtagatgtggcaaatgacttggccctgaaacttctccgggattattctgcagatgataccagaaaagtccacatgataacagagaatatcaatgcctcttggagaagcattcataaaagggtgagtgagcgagaggctgctttggaagaaactcatagattactgcaacagttccccctggacctggaaaagtttcttgcctggcttacagaagctgaaacaactgccaatgtcctacaggatgctacccgtaaggaaaggctcctagaagactccaagggagtaaaagagctgatgaaacaatggcaagacctccaaggtgaaattgaagctcacacagatgtttatcacaacctggatgaaaacagccaaaaaatcctgagatccctggaaggttccgatgatgcagtcctgttacaaagacgtttggataacatgaacttcaagtggagtgaacttcggaaaaagtctctcaacattaggtcccatttggaagccagttctgaccagtggaagcgtctgcacctttctctgcaggaacttctggtgtggctacagctgaaagatgatgaattaagccggcaggcacctattggaggcgactttccagcagttcagaagcagaacgatgtacatagggccttcaagagggaattgaaaactaaagaacctgtaatcatgagtactcttgagactgtacgaatatttctgacagagcagcctttggaaggactagagaaactctaccaggagcccagagagctgcctcctgaggagagagcccagaatgtcactcggcttctacgaaagcaggctgaggaggtcaatactgagtgggaaaaattgaacctgcactccgctgactggcagagaaaaatagatgagacccttgaaagactccaggaacttcaagaggccacggatgagctggacctcaagctgcgccaagctgaggtgatcaagggatcctggcagcccgtgggcgatctcctcattgactctctccaagatcacctcgagaaagtcaaggcacttcgaggagaaattgcgcctctgaaagagaacgtgagccacgtcaatgaccttgctcgccagcttaccactttgggcattcagctctcaccgtataacctcagcactctggaagacctgaacaccagatggaagcttctgcaggtggccgtcgaggaccgagtcaggcagctgcatgaagcccacagggactttggtccagcatctcagcactttctttccacgtctgtccagggtccctgggagagagccatctcgccaaacaaagtgccctactatatcaaccacgagactcaaacaacttgctgggaccatcccaaaatgacagagctctaccagtctttagctgacctgaataatgtcagattctcagcttataggactgccatgaaactccgaagactgcagaaggccctttgcttggatctcttgagcctgtcagctgcatgtgatgccttggaccagcacaacctcaagcaaaatgaccagcccatggatatcctgcagattattaattgtttgaccactatttatgaccgcctggagcaagagcacaacaatttggtcaacgtccctctctgcgtggatatgtgtctgaactggctgctgaatgtttatgatacgggacgaacagggaggatccgtgtcctgtcttttaaaactggcatcatttccctgtgtaaagcacatttggaagacaagtacagataccttttcaagcaagtggcaagttcaacaggattttgtgaccagcgcaggctgggcctccttctgcatgattctatccaaattccaagacagttgggtgaagttgcatcctttgggggcagtaacattgagccaagtgtccggagctgcttccaatttgctaataataagccagagatcgaagcggccctcttcctagactggatgagactggaaccccagtccatggtgtggctgcccgtcctgcacagagtggctgctgcagaaactgccaagcatcaggccaaatgtaacatctgcaaagagtgtccaatcattggattcaggtacaggagtctaaagcactttaattatgacatctgccaaagctgctttttttctggtcgagttgcaaaaggccataaaatgcactatcccatggtggaatattgcactccgactacatcaggagaagatgttcgagactttgccaaggtactaaaaaacaaatttcgaaccaaaaggtattttgcgaagcatccccgaatgggctacctgccagtgcagactgtcttagagggggacaacatggaaactcccgttactctgatcaacttctggccagtagattctgcgcctgcctcgtcccctcagctttcacacgatgatactcattcacgcattgaacattatgctagcaggctagcagaaatggaaaacagcaatggatcttatctaaatgatagcatctctcctaatgagagcatagatgatgaacatttgttaatccagcattactgccaaagtttgaaccaggactcccccctgagccagcctcgtagtcctgcccagatcttgatttccttagagagtgaggaaagaggggagctagagagaatcctagcagatcttgaggaagaaaacaggaatctgcaagcagaatatgaccgtctaaagcagcagcacgaacataaaggcctgtccccactgccgtcccctcctgaaatgatgcccacctctccccagagtccccgggatgctgagctcattgctgaggccaagctactgcgtcaacacaaaggccgcctggaagccaggatgcaaatcctggaagaccacaataaacagctggagtcacagttacacaggctaaggcagctgctggagcaaccccaggcagaggccaaagtgaatggcacaacggtgtcctctccttctacctctctacagaggtccgacagcagtcagcctatgctgctccgagtggttggcagtcaaacttcggactccatgggtgaggaagatcttctcagtcctccccaggacacaagcacagggttagaggaggtgatggagcaactcaacaactccttccctagttcaagaggaagaaatacccctggaaagccaatgagagaggacacaatgtaggaagtcttttccacatggcagatgatttgggcagagcgatggagtccttagtatcagtcatgacagatgaagaaggagcagaataaatgttttacaactcctgattcccgcatggtttttataatattcatacaacaaagaggattagacagtaagagtttacaagaaataaatctatatttttgtgaagggtagtggtattatactgtagatttcagtagtttctaagtctgttattgttttgttaacaatggcaggttttacacgtctatgcaattgtacaaaaaagttataagaaaactacatgtaaaatcttgatagctaaataacttgccatttctttatatggaacgcattttgggttgtttaaaaatttataacagttataaagaaagattgtaaactaaagtgtgctttataaaaaaaagttgtttataaaaacccctaaaaacaaaacaaacacacacacacacacatacacacacacacacaaaactttgaggcagcgcattgttttgcatccttttggcgtgatatccatatgaaattcatggctttttctttttttgcatattaaagataagacttcctctaccaccacaccaaatgactactacacactgctcatttgagaactgtcagctgagtggggcaggcttgagttttcatttcatatatctatatgtctataagtatataaatactatagttatatagataaagagatacgaatttctatagactgactttttccattttttaaatgttcatgtcacatcctaatagaaagaaattacttctagtcagtcatccaggcttacctgcttggtctagaatggatttttcccggagccggaagccaggaggaaactacaccacactaaaacattgtctacagctccagatgtttctcattttaaacaactttccactgacaacgaaagtaaagtaaagtattggatttttttaaagggaacatgtgaatgaatacacaggacttattatatcagagtgagtaatcggttggttggttgattgattgattgattgatacattcagcttcctgctgctagcaatgccacgatttagatttaatgatgcttcagtggaaatcaatcagaaggtattctgaccttgtgaacatcagaaggtattttttaactcccaagcagtagcaggacgatgatagggctggagggctatggattcccagcccatccctgtgaaggagtaggccactctttaagtgaaggattggatgattgttcataatacataaagttctctgtaattacaactaaattattatgccctcttctcacagtcaaaaggaactgggtggtttggtttttgttgcttttttagatttattgtcccatgtgggatgagtttttaaatgccacaagacataatttaaaataaataaactttgggaaaaggtgtaaaacagtagccccatcacatttgtgatactgacaggtatcaacccagaagcccatgaactgtgtttccatcctttgcatttctctgcgagtagttccacacaggtttgtaagtaagtaagaaagaaggcaaattgattcaaatgttacaaaaaaacccttcttggtggattagacaggttaaatatataaacaaacaaacaaaaattgctcaaaaaagaggagaaaagctcaagaggaaaagctaaggactggtaggaaaaagctttactctttcatgccattttatttctttttgatttttaaatcattcattcaatagataccaccgtgtgacctataattttgcaaatctgttacctctgacatcaagtgtaattagcttttggagagtgggctgacatcaagtgtaattagcttttggagagtgggttttgtccattattaataattaattaattaacatcaaacacggcttctcatgctatttctacctcactttggttttggggtgttcctgataattgtgcacacctgagttcacagcttcaccacttgtccattgcgttattttctttttcctttataattctttctttttccttcataattttcaaaagaaaacccaaagctctaaggtaacaaattaccaaattacatgaagatttggtttttgtcttgcatttttttcctttatgtgacgctggaccttttctttacccaaggatttttaaaactcagatttaaaacaaggggttactttacatcctactaagaagtttaagtaagtaagtttcattctaaaatcagaggtaaatagagtgcataaataattttgttttaatctttttgtttttcttttagacacattagctctggagtgagtctgtcataatatttgaacaaaaattgagagctttattgctgcattttaagcataattaatttggacattatttcgtgttgtgttctttataaccaccaagtattaaactgtaaatcataatgtaactgaagcataaacatcacatggcatgttttgtcattgttttcaggtactgagttcttacttgagtatcataatatattgtgttttaacaccaacactgtaacatttacgaattatttttttaaacttcagttttactgcattttcacaacatatcagacttcaccaaatatatgccttactattgtattatagtactgctttactgtgtatctcaataaagcacgcagttatgttac

SEQ ID NO: 2240 - DNA, 182 bp, Homo sapiens
atgttgataccacctatccagataagaagtccatcttaatgtacatcacatcactcttccaagttttgcctcaacaagtgagcattgaagccatccaggaagtggaaatgttgccaaggccacctaaagtgactaaagaagaacattttcagttacatcatcaaatgcactattctcaacag

SEQ ID NO: 2241 - DNA, 213 bp, Homo sapiens
gctttacaaagttctctgcaagagcaacaaagtggcctatactatctcagcaccactgtgaaagagatgtcgaagaaagcgccctctgaaattagccggaaatatcaatcagaatttgaagaaattgagggacgctggaagaagctctcctcccagctggttgagcattgtcaaaagctagaggagcaaatgaataaactccgaaaaattcag

SEQ ID NO: 2242 - DNA, 173 bp, Homo sapiens
aatataaaagatagtctacaacaaagctcaggtcggattgacattattcatagcaagaagacagcagcattgcaaagtgcaacgcctgtggaaagggtgaagctacaggaagctctctcccagcttgatttccaatgggaaaaagttaacaaaatgtacaaggaccgacaagg

SEQ ID NO: 2243 - DNA, 148 bp, Homo sapiens
gcgatttgacagatctgttgagaaatggcggcgttttcattatgatataaagatatttaatcagtggctaacagaagctgaacagtttctcagaaagacacaaattcctgagaattgggaacatgctaaatacaaatggtatcttaag

SEQ ID NO: 2244 - DNA, 176 bp, Homo sapiens
gaactccaggatggcattgggcagcggcaaactgttgtcagaacattgaatgcaactggggaagaaataattcagcaatcctcaaaaacagatgccagtattctacaggaaaaattgggaagcctgaatctgcggtggcaggaggtctgcaaacagctgtcagacagaaaaaagag

SEQ ID NO: 2245 - DNA, 148 bp, Homo sapiens
gctagaagaacaaaagaatatcttgtcagaatttcaaagagatttaaatgaatttgttttatggttggaggaagcagataacattgctagtatcccacttgaacctggaaaagagcagcaactaaaagaaaagcttgagcaagtcaag

SEQ ID NO: 2246 - DNA, 109 bp, Homo sapiens
aggaagttagaagatctgagctctgagtggaaggcggtaaaccgtttacttcaagagctgagggcaaagcagcctgacctagctcctggactgaccactattggagcct

SEQ ID NO: 2247 - DNA, 233 bp, Homo sapiens
ctcctactcagactgttactctggtgacacaacctgtggttactaaggaaactgccatctccaaactagaaatgccatcttccttgatgttggaggtacctgctctggcagatttcaaccgggcttggacagaacttaccgactggctttctctgcttgatcaagttataaaatcacagagggtgatggtgggtgaccttgaggatatcaacgagatgatcatcaagcagaag

SEQ ID NO: 2248 - DNA, 118 bp, Homo sapiens
gcaacaatgcaggatttggaacagaggcgtccccagttggaagaactcattaccgctgcccaaaatttgaaaaacaagaccagcaatcaagaggctagaacaatcattacggatcgaa

SEQ ID NO: 2249 - DNA, 212 bp, Homo sapiens
ttgaaagaattcagaatcagtgggatgaagtacaagaacaccttcagaaccggaggcaacagttgaatgaaatgttaaaggattcaacacaatggctggaagctaaggaagaagctgagcaggtcttaggacaggccagagccaagcttgagtcatggaaggagggtccctatacagtagatgcaatccaaaagaaaatcacagaaaccaag

SEQ ID NO: 2250 - DNA, 190 bp, Homo sapiens
ggtgagtgagcgagaggctgctttggaagaaactcatagattactgcaacagttccccctggacctggaaaagtttcttgcctggcttacagaagctgaaacaactgccaatgtcctacaggatgctacccgtaaggaaaggctcctagaagactccaagggagtaaaagagctgatgaaacaatggcaa

SEQ ID NO: 2251 - RNA, 21 nt, Artificial Sequence
  Synthetic
ccuccgguucugaagguguuc

SEQ ID NO: 2252 - RNA, 18 nt, Artificial Sequence
  Synthetic
cgcugcccaaugccaucc

SEQ ID NO: 2253 - DNA, 22 bp, Artificial Sequence
  Synthetic
caacttcagccatccatttctg

SEQ ID NO: 2254 - DNA, 20 bp, Artificial Sequence
  Synthetic
tcaaggaagatggcatttct

SEQ ID NO: 2255 - DNA, 22 bp, Artificial Sequence
  Synthetic
caatgccatcctggagttcctg

SEQ ID NO: 2256 - DNA, 25 bp, Artificial Sequence
  Synthetic
gttgcctccggttctgaaggtgttc

SEQ ID NO: 2257 - DNA, 21 bp, Artificial Sequence
  Synthetic
cctccggttctgaaggtgttc

SEQ ID NO: 2258 - DNA, 18 bp, Artificial Sequence
  Synthetic
cgctgcccaatgccatcc

SEQ ID NO: 2259 - DNA, 20 bp, Artificial Sequence
  Synthetic
agaaatgccatcttccttga

SEQ ID NO: 2260 - DNA, 22 bp, Artificial Sequence
  Synthetic
caggaactccaggatggcattg

SEQ ID NO: 2261 - DNA, 25 bp, Artificial Sequence
  Synthetic
gaacaccttcagaaccggaggcaac

SEQ ID NO: 2262 - DNA, 21 bp, Artificial Sequence
  Synthetic
gaacaccttcagaaccggagg

SEQ ID NO: 2263 - DNA, 18 bp, Artificial Sequence
  Synthetic
ggatggcattgggcagcg

SEQ ID NO: 2264 - DNA, 21 bp, Artificial Sequence
  Synthetic
cacatctttgatggtgtgagg

SEQ ID NO: 2265 - protein, 10 aa, Artificial Sequence
  Synthetic
GYTFTNYWMH

SEQ ID NO: 2266 - protein, 17 aa, Artificial Sequence
  Synthetic
EINPINGRSNYGERFKT

SEQ ID NO: 2267 - protein, 7 aa, Artificial Sequence
  Synthetic
GTRAMHY

SEQ ID NO: 2268 - protein, 11 aa, Artificial Sequence
  Synthetic
RTSENIYNNLA

SEQ ID NO: 2269 - protein, 7 aa, Artificial Sequence
  Synthetic
AATNLAD

SEQ ID NO: 2270 - protein, 10 aa, Artificial Sequence
  Synthetic
QHFWGTPLTF

SEQ ID NO: 2271 - protein, 116 aa, Artificial Sequence
  Synthetic
QVQLQQPGAELVKPGASVKLSCKASGYTFTNYWMHWVKQRPGQGLEWIGEINPINGRSNYGERFKTKATLTVDKSSSTAYMQLSSLTSEDSAVYYCARGTRAMHYWGQGTSVTVSS

SEQ ID NO: 2272 - protein, 107 aa, Artificial Sequence
  Synthetic
DIQMTQSPASLSVSVGETVTITCRTSENIYNNLAWYQQKQGKSPQLLVYAATNLADGVPSRFSGSGSGTQYSLKINSLQSEDFGNYYCQHFWGTPLTFGAGTKLELK

SEQ ID NO: 2273 - protein, 9 aa, Artificial Sequence
  Synthetic
YTFTNYWMH

SEQ ID NO: 2274 - protein, 17 aa, Artificial Sequence
  Synthetic
EINPINGRSNYAQKFQG

SEQ ID NO: 2275 - protein, 17 aa, Artificial Sequence
  Synthetic
EINPINGRSNYAEKFQG

SEQ ID NO: 2276 - protein, 17 aa, Artificial Sequence
  Synthetic
EINPIQGRSNYAEKFQG

SEQ ID NO: 2277 - protein, 7 aa, Artificial Sequence
  Synthetic
AATNLAE

SEQ ID NO: 2278 - protein, 11 aa, Artificial Sequence
  Synthetic
RTSENIYSNLA

SEQ ID NO: 2279 - protein, 7 aa, Artificial Sequence
  Synthetic
AGTNLAD

SEQ ID NO: 2280 - protein, 116 aa, Artificial Sequence
  Synthetic
QVQLVQSGAEVKKPGASVKVSCKASGYTFTNYWMHWVRQAPGQGLEWMGEINPINGRSNYAQKFQGRVTLTVDTSISTAYMELSRLRSDDTAVYYCARGTRAMHYWGQGTLVTVSS

SEQ ID NO: 2281 - protein, 116 aa, Artificial Sequence
  Synthetic
QVQLVQSGAEVKKPGASVKVSCKASGYTFTNYWMHWVRQAPGQGLEWIGEINPINGRSNYAEKFQGRVTLTVDTSSSTAYMELSRLRSDDTAVYYCARGTRAMHYWGQGTLVTVSS

SEQ ID NO: 2282 - protein, 116 aa, Artificial Sequence
  Synthetic
QVQLVQSGAEVKKPGASVKVSCKASGYTFTNYWMHWVRQAPGQGLEWMGEINPIQGRSNYAEKFQGRVTLTVDTSSSTAYMELSSLRSEDTATYYCARGTRAMHYWGQGTLVTVSS

SEQ ID NO: 2283 - protein, 116 aa, Artificial Sequence
  Synthetic
QVQLVQSGAEVKKPGASVKVSCKASGYTFTNYWMHWVRQAPGQGLEWMGEINPINGRSNYAEKFQGRVTLTVDTSSSTAYMELSSLRSEDTATYYCARGTRAMHYWGQGTLVTVSS

SEQ ID NO: 2284 - protein, 107 aa, Artificial Sequence
  Synthetic
DIQMTQSPSSLSASVGDRVTITCRTSENIYNNLAWYQQKPGKSPKLLIYAATNLADGVPSRFSGSGSGTDYTLTISSLQPEDFATYYCQHFWGTPLTFGGGTKVEIK

SEQ ID NO: 2285 - protein, 107 aa, Artificial Sequence
  Synthetic
DIQMTQSPSSLSASVGDRVTITCRTSENIYNNLAWYQQKPGKAPKLLIYAATNLADGVPSRFSGSGSGTDYTLTISSLQPEDFATYYCQHFWGTPLTFGGGTKVEIK

SEQ ID NO: 2286 - protein, 107 aa, Artificial Sequence
  Synthetic
DIQMTQSPSSLSASVGDRVTITCRTSENIYNNLAWYQQKPGKAPKLLIYAATNLAEGVPSRFSGSGSGTDYTLTISSLQPEDFATYYCQHFWGTPLTFGGGTKVEIK

SEQ ID NO: 2287 - protein, 107 aa, Artificial Sequence
  Synthetic
DIQMTQSPSSLSASVGDRVTITCRTSENIYSNLAWYQQKPGKAPKLLIYAGTNLADGVPSRFSGSGSGTDYTLTISSLQPEDFANYYCQHFWGTPLTFGGGTKVEIK

1. A complex comprising an anti-transferrin receptor (TfR) antibody covalently linked to a molecular payload configured for promoting the expression or activity of a DMD gene, wherein the antibody comprises:
a heavy chain variable region (VH) comprising an amino acid sequence at least 95% identical to SEQ ID NO: 77; and/or a light chain variable region (VL) comprising an amino acid sequence at least 95% identical to SEQ ID NO: 78.

2. The complex of claim 1, wherein the antibody comprises:
a VH comprising the amino acid sequence of SEQ ID NO: 77 and a VL comprising the amino acid sequence of SEQ ID NO: 78.

3. The complex of claim 1, wherein the antibody is selected from the group consisting of a Fab fragment, a Fab′ fragment, a F(ab′)₂ fragment, a scFv, a Fv, and a full-length IgG.

4. The complex of claim 3, wherein the antibody is a Fab fragment.

5. The complex of claim 4, wherein the antibody comprises:
a heavy chain comprising an amino acid sequence at least 85% identical to SEQ ID NO: 101; and/or a light chain comprising an amino acid sequence at least 85% identical to SEQ ID NO: 89.

6. The complex of claim 4, wherein the antibody comprises:
a heavy chain comprising the amino acid sequence of SEQ ID NO: 102; and a light chain comprising the amino acid sequence of SEQ ID NO: 93.

7. The complex of claim 1, wherein the antibody does not specifically bind to the transferrin binding site of the transferrin receptor and/or wherein the muscle-targeting antibody does not inhibit binding of transferrin to the transferrin receptor.

8. The complex claim 1, wherein the molecular payload is an oligonucleotide.

9. The complex of claim 8, wherein the oligonucleotide promotes exon skipping in a DMD RNA.

10. The complex of claim 9, wherein the oligonucleotide promotes skipping of an exon of DMD in the range of exon 8 to exon 55.

11. (canceled)

12. The complex of claim 1, wherein the oligonucleotide comprises a region of complementarity to one or more full or partial exonic splicing enhancers (ESE) of a DMD transcript.

13. The complex of claim 8, wherein the oligonucleotide comprises a region of complementarity to a target sequence comprising one or more full or partial ESEs as set forth in SEQ ID NOs: 402-436 and 2043-2238.

14. The complex of claim 8, wherein the oligonucleotide promotes skipping of exon 51.

15. The complex of claim 8, wherein the oligonucleotide is 20-30 nucleotides in length and comprises a region of complementarity to a target sequence comprising at least 4 consecutive nucleotides of an ESE as set forth in any one of SEQ ID NOs: 402-436.

16. The complex of claim 8, wherein the oligonucleotide comprises any one of SEQ ID NOs: 437-1241, or comprises a region of complementarity to any one of SEQ ID NOs: 1242-2046.

17. The complex of claim 8, wherein the oligonucleotide comprises a region of complementarity to a target sequence of an oligonucleotide listed in Table 14, optionally wherein the oligonucleotide comprises a sequence listed in Table 14, wherein any one or more of the uracil bases (U's) in the oligonucleotide may optionally be a thymine base (T).

18.-22. (canceled)

23. The complex of claim 8, wherein the oligonucleotide comprises one or more phosphorodiamidate morpholinos, optionally wherein the oligonucleotide is a phosphorodiamidate morpholino oligomer (PMO).

24. The complex of claim 1, wherein the antibody is covalently linked to the molecular payload via a cleavable linker, wherein the cleavable linker comprises a valine-citrulline sequence.

25.-26. (canceled)

27. A method of promoting the expression or activity of a DMD protein in a cell, the method comprising contacting the cell with the complex of claim 1 in an amount effective for promoting internalization of the molecular payload to the cell, optionally wherein the cell is a muscle cell.

28. A method of treating a subject having a mutated DMD allele that is associated with a dystrophinopathy, the method comprising administering to the subject an effective amount of the complex of claim 1.
